(19) United States
(12) Patent Application Publication
(10) Pub. No.: US 2004/0241703 A1
(43) Pub. Date: Dec. 2, 2004

(54) Compositions and methods for the diagnosis and treatment of tumor

(75) Inventors: Frederic J. DeSauvage, Foster City, CA (US); Gretchen Frantz, San Francisco, CA (US); Kenneth J. Hillan, San Francisco, CA (US); Paul Polakis, Burlingame, CA (US); Andrew Polson, San Francisco, CA (US); Victoria Smith, Burlingame, CA (US); Susan D. Spencer, Tiburon, CA (US); Thomas D. Wu, San Francisco, CA (US); Zemin Zhang, Foster City, CA (US)

Correspondence Address: GENENTECH, INC., 1 DNA WAY, SOUTH SAN FRANCISCO, CA, 94080, US

(73) Assignee: GENENTECH, INC.

(21) Appl. No.: 10/643,795

(22) Filed: Aug. 19, 2003

Related U.S. Application Data
(60) Provisional application No. 60/484,959, filed on Jul. 2, 2003.
(60) Provisional application No. 60/426,847, filed on Nov. 15, 2002.
(60) Provisional application No. 60/419,008, filed on Oct. 15, 2002.
(60) Provisional application No. 60/413,192, filed on Sep. 23, 2002.
(60) Provisional application No. 60/405,645, filed on Aug. 21, 2002.
(60) Provisional application No. 60/404,809, filed on Aug. 19, 2002.

(51) Int. Cl. C12Q 1/68; C07H 21/04; C07K 16/44; C12N 5/06

(52) U.S. Cl. 435/6; 435/69.1; 435/320.1; 435/326; 530/388.15; 536/23.53

(57) ABSTRACT

The present invention is directed to compositions of matter useful for the diagnosis and treatment of tumor in mammals and to methods of using those compositions of matter for the same.

### FIELD OF THE INVENTION

[0001] The present invention is directed to compositions of matter useful for the diagnosis and treatment of tumor in mammals and to methods of using those compositions of matter for the same.

### BACKGROUND OF THE INVENTION

[0002] Malignant tumors (cancers) are the second leading cause of death in the United States, after heart disease (Boring et al., CA Cancel J. Clin. 43:7 (1993)). Cancer is characterized by the increase in the number of abnormal, or neoplastic, cells derived from a normal tissue which proliferate to form a tumor mass, the invasion of adjacent tissues by these neoplastic tumor cells, and the generation of malignant cells which eventually spread via the blood or lymphatic system to regional lymph nodes and to distant sites via a process called metastasis. In a cancerous state, a cell proliferates under conditions in which normal cells would not grow. Cancer manifests itself in a wide variety of forms, characterized by different degrees of invasiveness and aggressiveness.

[0003] In attempts to discover effective cellular targets for cancer diagnosis and therapy, researchers have sought to identify transmembrane or otherwise membrane-associated polypeptides that are specifically expressed on the surface of one or more particular type(s) of cancer cell as compared to on one or more normal non-cancerous cell(s). Often, such membrane-associated polypeptides are more abundantly expressed on the surface of the cancer cells as compared to on the surface of the non-cancerous cells. The identification of such tumor-associated cell surface antigen polypeptides has given rise to the ability to specifically target cancer cells for destruction via antibody-based therapies. In this regard, it is noted that antibody-based therapy has proved very effective in the treatment of certain cancers. For example, HERCEPTIN® and RITUXAN® (both from Genentech Inc., South San Francisco, Calif.) are antibodies that have been used successfully to treat breast cancer and non-Hodgkin's lymphoma, respectively. More specifically, HERCEPTIN® is a recombinant DNA-derived humanized monoclonal antibody that selectively binds to the extracellular domain of the human epidermal growth factor receptor 2 (HER2) proto-oncogene. HER2 protein overexpression is observed in 25-30% of primary breast cancers. RITUXAN® is a genetically engineered chimeric murine/human monoclonal antibody directed against the CD20 antigen found on the surface of normal and malignant B lymphocytes. Both these antibodies are recombinantly produced in CHO cells.

[0004] In other attempts to discover effective cellular targets for cancer diagnosis and therapy, researchers have sought to identify (1) non-membrane-associated polypeptides that are specifically produced by one or more particular type(s) of cancer cell(s) as compared to by one or more particular type(s) of non-cancerous normal cell(s), (2) polypeptides that are produced by cancer cells at an expression level that is significantly higher than that of one or more normal non-cancerous cell(s), or (3) polypeptides whose expression is specifically limited to only a single (or very limited number of different) tissue type(s) in both the cancerous and non-cancerous state (e.g., normal prostate and prostate tumor tissue). Such polypeptides may remain intracellularly located or may be secreted by the cancer cell. Moreover, such polypeptides may be expressed not by the cancer cell itself, but rather by cells which produce and/or secrete polypeptides having a potentiating or growth-enhancing effect on cancer cells. Such secreted polypeptides are often proteins that provide cancer cells with a growth advantage over normal cells and include such things as, for example, angiogenic factors, cellular adhesion factors, growth factors, and the like. Identification of antagonists of such non-membrane associated polypeptides would be expected to serve as effective therapeutic agents for the treatment of such cancers. Furthermore, identification of the expression pattern of such polypeptides would be useful for the diagnosis of particular cancers in mammals.

[0005] Despite the above identified advances in mammalian cancer therapy, there is a great need for additional diagnostic and therapeutic agents capable of detecting the presence of tumor in a mammal and for effectively inhibiting neoplastic cell growth, respectively. Accordingly, it is an objective of the present invention to identify: (1) cell membrane-associated polypeptides that are more abundantly expressed on one or more type(s) of cancer cell(s) as compared to on normal cells or on other different cancer cells, (2) non-membrane-associated polypeptides that are specifically produced by one or more particular type(s) of cancer cell(s) (or by other cells that produce polypeptides having a potentiating effect on the growth of cancer cells) as compared to by one or more particular type(s) of non-cancerous normal cell(s), (3) non-membrane-associated polypeptides that are produced by cancer cells at an expression level that is significantly higher than that of one or more normal non-cancerous cell(s), or (4) polypeptides whose expression is specifically limited to only a single (or very limited number of different) tissue type(s) in both a cancerous and non-cancerous state (e.g., normal prostate and prostate tumor tissue), and to use those polypeptides, and their encoding nucleic acids, to produce compositions of matter useful in the therapeutic treatment and diagnostic detection of cancer in mammals. It is also an objective of the present invention to identify cell membrane-associated, secreted or intracellular polypeptides whose expression is limited to a single or very limited number of tissues, and to use those polypeptides, and their encoding nucleic acids, to produce compositions of matter useful in the therapeutic treatment and diagnostic detection of cancer in mammals.

### SUMMARY OF THE INVENTION

[0006] A. Embodiments

[0007] In the present specification, Applicants describe for the first time the identification of various cellular polypeptides (and their encoding nucleic acids or fragments thereof) which are expressed to a greater degree on the surface of or by one or more types of cancer cell(s) as compared to on the surface of or by one or more types of normal non-cancer cells. Alternatively, such polypeptides are expressed by cells which produce and/or secrete polypeptides having a potentiating or growth-enhancing effect on cancer cells. Again alternatively, such polypeptides may not be overexpressed by tumor cells as compared to normal cells of the same tissue type, but rather may be specifically expressed by both tumor cells and normal cells of only a single or very limited number of tissue types (preferably tissues which are not essential for life, e.g., prostate, etc.). All of the above polypeptides are herein referred to as Tumor-associated Antigenic Target polypeptides (“TAT” polypeptides) and are expected to serve as effective targets for cancer therapy and diagnosis in mammals.

[0008] Accordingly, in one embodiment of the present invention, the invention provides an isolated nucleic acid molecule having a nucleotide sequence that encodes a tumor-associated antigenic target polypeptide or fragment thereof (a “TAT” polypeptide).

[0009] In certain aspects, the isolated nucleic acid molecule comprises a nucleotide sequence having at least about 80% nucleic acid sequence identity, alternatively at least about 81%, 82%, 83%, 84%, 85%, 86%, 87%, 88%, 89%, 90%, 91%, 92%, 93%, 94%, 95%, 96%, 97%, 98%, 99% or 100% nucleic acid sequence identity, to (a) a DNA molecule encoding a full-length TAT polypeptide having an amino acid sequence as disclosed herein, a TAT polypeptide amino acid sequence lacking the signal peptide as disclosed herein, an extracellular domain of a transmembrane TAT polypeptide, with or without the signal peptide, as disclosed herein or any other specifically defined fragment of a full-length TAT polypeptide amino acid sequence as disclosed herein, or (b) the complement of the DNA molecule of (a).

[0010] In other aspects, the isolated nucleic acid molecule comprises a nucleotide sequence having at least about 80% nucleic acid sequence identity, alternatively at least about 81%, 82%, 83%, 84%, 85%, 86%, 87%, 88%, 89%, 90%, 91%, 92%, 93%, 94%, 95%, 96%, 97%, 98%, 99% or 100% nucleic acid sequence identity, to (a) a DNA molecule comprising the coding sequence of a full-length TAT polypeptide cDNA as disclosed herein, the coding sequence of a TAT polypeptide lacking the signal peptide as disclosed herein, the coding sequence of an extracellular domain of a transmembrane TAT polypeptide, with or without the signal peptide, as disclosed herein or the coding sequence of any other specifically defined fragment of the full-length TAT polypeptide amino acid sequence as disclosed herein, or (b) the complement of the DNA molecule of (a).

[0011] In further aspects, the invention concerns an isolated nucleic acid molecule comprising a nucleotide sequence having at least about 80% nucleic acid sequence identity, alternatively at least about 81%, 82%, 83%, 84%, 85%, 86%, 87%, 88%, 89%, 90%, 91%, 92%, 93%, 94%, 95%, 96%, 97%, 98%, 99% or 100% nucleic acid sequence identity, to (a) a DNA molecule that encodes the same mature polypeptide encoded by the full-length coding region of any of the human protein cDNAs deposited with the ATCC as disclosed herein, or (b) the complement of the DNA molecule of (a).

[0012] Another aspect of the invention provides an isolated nucleic acid molecule comprising a nucleotide sequence encoding a TAT polypeptide which is either transmembrane domain-deleted or transmembrane domain-inactivated, or is complementary to such encoding nucleotide sequence, wherein the transmembrane domain(s) of such polypeptide(s) are disclosed herein. Therefore, soluble extracellular domains of the herein described TAT polypeptides are contemplated.

[0013] In other aspects, the present invention is directed to isolated nucleic acid molecules which hybridize to (a) a nucleotide sequence encoding a TAT polypeptide having a full-length amino acid sequence as disclosed herein, a TAT polypeptide amino acid sequence lacking the signal peptide as disclosed herein, an extracellular domain of a transmembrane TAT polypeptide, with or without the signal peptide, as disclosed herein or any other specifically defined fragment of a full-length TAT polypeptide amino acid sequence as disclosed herein, or (b) the complement of the nucleotide sequence of (a). In this regard, an embodiment of the present invention is directed to fragments of a full-length TAT polypeptide coding sequence, or the complement thereof, as disclosed herein, that may find use as, for example, hybridization probes useful as, for example, diagnostic probes, antisense oligonucleotide probes, or for encoding fragments of a full-length TAT polypeptide that may optionally encode a polypeptide comprising a binding site for an anti-TAT polypeptide antibody, a TAT binding oligopeptide or other small organic molecule that binds to a TAT polypeptide. Such nucleic acid fragments are usually at least about 5 nucleotides in length, alternatively at least about 6, 7, 8, 9, 10, 11, 12, 13, 14, 15, 16, 17, 18, 19, 20, 21, 22, 23, 24, 25, 26, 27, 28, 29, 30, 35, 40, 45, 50, 55, 60, 65, 70, 75, 80, 85, 90, 95, 100, 105, 110, 115, 120, 125, 130, 135, 140, 145, 150, 155, 160, 165, 170, 175, 180, 185, 190, 195, 200, 210, 220, 230, 240, 250, 260, 270, 280, 290, 300, 310, 320, 330, 340, 350, 360, 370, 380, 390, 400, 410, 420, 430, 440, 450, 460, 470, 480, 490, 500, 510, 520, 530, 540, 550, 560, 570, 580, 590, 600, 610, 620, 630, 640, 650, 660, 670, 680, 690, 700, 710, 720, 730, 740, 750, 760, 770, 780, 790, 800, 810, 820, 830, 840, 850, 860, 870, 880, 890, 900, 910, 920, 930, 940, 950, 960, 970, 980, 990, or 1000 nucleotides in length, wherein in this context the term “about” means the referenced nucleotide sequence length plus or minus 10% of that referenced length. It is noted that novel fragments of a TAT polypeptide-encoding nucleotide sequence may be determined in a routine manner by aligning the TAT polypeptide-encoding nucleotide sequence with other known nucleotide sequences using any of a number of well known sequence alignment programs and determining which TAT polypeptide-encoding nucleotide sequence fragment(s) are novel. All of such novel fragments of TAT polypeptide-encoding nucleotide sequences are contemplated herein. Also contemplated are the TAT polypeptide fragments encoded by these nucleotide molecule fragments, preferably those TAT polypeptide fragments that comprise a binding site for an anti-TAT antibody, a TAT binding oligopeptide or other small organic molecule that binds to a TAT polypeptide.

[0014] In another embodiment, the invention provides isolated TAT polypeptides encoded by any of the isolated nucleic acid sequences hereinabove identified.

[0015] In a certain aspect, the invention concerns an isolated TAT polypeptide, comprising an amino acid sequence having at least about 80% amino acid sequence identity, alternatively at least about 81%, 82%, 83%, 84%, 85%, 86%, 87%, 88%, 89%, 90%, 91%, 92%, 93%, 94%, 95%, 96%, 97%, 98%, 99% or 100% amino acid sequence identity, to a TAT polypeptide having a full-length amino acid sequence as disclosed herein, a TAT polypeptide amino acid sequence lacking the signal peptide as disclosed herein, an extracellular domain of a transmembrane TAT polypeptide protein, with or without the signal peptide, as disclosed herein, an amino acid sequence encoded by any of the nucleic acid sequences disclosed herein or any other specifically defined fragment of a full-length TAT polypeptide amino acid sequence as disclosed herein.

[0016] In a further aspect, the invention concerns an isolated TAT polypeptide comprising an amino acid sequence having at least about 80% amino acid sequence identity, alternatively at least about 81%, 82%, 83%, 84%, 85%, 86%, 87%, 88%, 89%, 90%, 91%, 92%, 93%, 94%, 95%, 96%, 97%, 98%, or 99% amino acid sequence identity, to an amino acid sequence encoded by any of the human protein cDNAs deposited with the ATCC as disclosed herein.

[0017] In a specific aspect, the invention provides an isolated TAT polypeptide without the N-terminal signal sequence and/or without the initiating methionine and is encoded by a nucleotide sequence that encodes such an amino acid sequence as hereinbefore described. Processes for producing the same are also herein described, wherein those processes comprise culturing a host cell comprising a vector which comprises the appropriate encoding nucleic acid molecule under conditions suitable for expression of the TAT polypeptide and recovering the TAT polypeptide from the cell culture.

[0018] Another aspect of the invention provides an isolated TAT polypeptide which is either transmembrane domain-deleted or transmembrane domain-inactivated. Processes for producing the same are also herein described, wherein those processes comprise culturing a host cell comprising a vector which comprises the appropriate encoding nucleic acid molecule under conditions suitable for expression of the TAT polypeptide and recovering the TAT polypeptide from the cell culture.

[0019] In other embodiments of the present invention, the invention provides vectors comprising DNA encoding any of the herein described polypeptides. Host cells comprising any such vector are also provided. By way of example, the host cells may be CHO cells, E. coli cells, or yeast cells. A process for producing any of the herein described polypeptides is further provided and comprises culturing host cells under conditions suitable for expression of the desired polypeptide and recovering the desired polypeptide from the cell culture.

[0020] In other embodiments, the invention provides isolated chimeric polypeptides comprising any of the herein described TAT polypeptides fused to a heterologous (non-TAT) polypeptide. Example of such chimeric molecules comprise any of the herein described TAT polypeptides fused to a heterologous polypeptide such as, for example, an epitope tag sequence or a Fc region of an immunoglobulin.

[0021] In another embodiment, the invention provides an antibody which binds, preferably specifically, to any of the above or below described polypeptides. Optionally, the antibody is a monoclonal antibody, antibody fragment, chimeric antibody, humanized antibody, single-chain antibody or antibody that competitively inhibits the binding of an anti-TAT polypeptide antibody to its respective antigenic epitope. Antibodies of the present invention may optionally be conjugated to a growth inhibitory agent or cytotoxic agent such as a toxin, including, for example, a maytansinoid or calicheamicin, an antibiotic, a radioactive isotope, a nucleolytic enzyme, or the like. The antibodies of the present invention may optionally be produced in CHO cells or bacterial cells and preferably induce death of a cell to which they bind. For diagnostic purposes, the antibodies of the present invention may be detectably labeled, attached to a solid support, or the like.

[0022] In other embodiments of the present invention, the invention provides vectors comprising DNA encoding any of the herein described antibodies. Host cell comprising any such vector are also provided. By way of example, the host cells may be CHO cells, E. coli cells, or yeast cells. A process for producing any of the herein described antibodies is further provided and comprises culturing host cells under conditions suitable for expression of the desired antibody and recovering the desired antibody from the cell culture.

[0023] In another embodiment, the invention provides oligopeptides (“TAT binding oligopeptides”) which bind, preferably specifically, to any of the above or below described TAT polypeptides. Optionally, the TAT binding oligopeptides of the present invention may be conjugated to a growth inhibitory agent or cytotoxic agent such as a toxin, including, for example, a maytansinoid or calicheamicin, an antibiotic, a radioactive isotope, a nucleolytic enzyme, or the like. The TAT binding oligopeptides of the present invention may optionally be produced in CHO cells or bacterial cells and preferably induce death of a cell to which they bind. For diagnostic purposes, the TAT binding oligopeptides of the present invention may be detectably labeled, attached to a solid support, or the like.

[0024] In other embodiments of the present invention, the invention provides vectors comprising DNA encoding any of the herein described TAT binding oligopeptides. Host cell comprising any such vector are also provided. By way of example, the host cells may be CHO cells, E. coli cells, or yeast cells. A process for producing any of the herein described TAT binding oligopeptides is further provided and comprises culturing host cells under conditions suitable for expression of the desired oligopeptide and recovering the desired oligopeptide from the cell culture.

[0025] In another embodiment, the invention provides small organic molecules (“TAT binding organic molecules”) which bind, preferably specifically, to any of the above or below described TAT polypeptides. Optionally, the TAT binding organic molecules of the present invention may be conjugated to a growth inhibitory agent or cytotoxic agent such as a toxin, including, for example, a maytansinoid or calicheamicin, an antibiotic, a radioactive isotope, a nucleolytic enzyme, or the like. The TAT binding organic molecules of the present invention preferably induce death of a cell to which they bind. For diagnostic purposes, the TAT binding organic molecules of the present invention may be detectably labeled, attached to a solid support, or the like.

[0026] In a still further embodiment, the invention concerns a composition of matter comprising a TAT polypeptide as described herein, a chimeric TAT polypeptide as described herein, an anti-TAT antibody as described herein, a TAT binding oligopeptide as described herein, or a TAT binding organic molecule as described herein, in combination with a carrier. Optionally, the carrier is a pharmaceutically acceptable carrier.

[0027] In yet another embodiment, the invention concerns an article of manufacture comprising a container and a composition of matter contained within the container, wherein the composition of matter may comprise a TAT polypeptide as described herein, a chimeric TAT polypeptide as described herein, an anti-TAT antibody as described herein, a TAT binding oligopeptide as described herein, or a TAT binding organic molecule as described herein. The article may further optionally comprise a label affixed to the container, or a package insert included with the container, that refers to the use of the composition of matter for the therapeutic treatment or diagnostic detection of a tumor.

[0028] Another embodiment of the present invention is directed to the use of a TAT polypeptide as described herein, a chimeric TAT polypeptide as described herein, an anti-TAT polypeptide antibody as described herein, a TAT binding oligopeptide as described herein, or a TAT binding organic molecule as described herein, for the preparation of a medicament useful in the treatment of a condition which is responsive to the TAT polypeptide, chimeric TAT polypeptide, anti-TAT polypeptide antibody, TAT binding oligopeptide, or TAT binding organic molecule.

[0029] B. Additional Embodiments

[0030] Another embodiment of the present invention is directed to a method for inhibiting the growth of a cell that expresses a TAT polypeptide, wherein the method comprises contacting the cell with an antibody, an oligopeptide or a small organic molecule that binds to the TAT polypeptide, and wherein the binding of the antibody, oligopeptide or organic molecule to the TAT polypeptide causes inhibition of the growth of the cell expressing the TAT polypeptide. In preferred embodiments, the cell is a cancer cell and binding of the antibody, oligopeptide or organic molecule to the TAT polypeptide causes death of the cell expressing the TAT polypeptide. Optionally, the antibody is a monoclonal antibody, antibody fragment, chimeric antibody, humanized antibody, or single-chain antibody. Antibodies, TAT binding oligopeptides and TAT binding organic molecules employed in the methods of the present invention may optionally be conjugated to a growth inhibitory agent or cytotoxic agent such as a toxin, including, for example, a maytansinoid or calicheamicin, an antibiotic, a radioactive isotope, a nucleolytic enzyme, or the like. The antibodies and TAT binding oligopeptides employed in the methods of the present invention may optionally be produced in CHO cells or bacterial cells.

[0031] Yet another embodiment of the present invention is directed to a method of therapeutically treating a mammal having a cancerous tumor comprising cells that express a TAT polypeptide, wherein the method comprises administering to the mammal a therapeutically effective amount of an antibody, an oligopeptide or a small organic molecule that binds to the TAT polypeptide, thereby resulting in the effective therapeutic treatment of the tumor. Optionally, the antibody is a monoclonal antibody, antibody fragment, chimeric antibody, humanized antibody, or single-chain antibody. Antibodies, TAT binding oligopeptides and TAT binding organic molecules employed in the methods of the present invention may optionally be conjugated to a growth inhibitory agent or cytotoxic agent such as a toxin, including, for example, a maytansinoid or calicheamicin, an antibiotic, a radioactive isotope, a nucleolytic enzyme, or the like. The antibodies and oligopeptides employed in the methods of the present invention may optionally be produced in CHO cells or bacterial cells.

[0032] Yet another embodiment of the present invention is directed to a method of determining the presence of a TAT polypeptide in a sample suspected of containing the TAT polypeptide, wherein the method comprises exposing the sample to an antibody, oligopeptide or small organic molecule that binds to the TAT polypeptide and determining binding of the antibody, oligopeptide or organic molecule to the TAT polypeptide in the sample, wherein the presence of such binding is indicative of the presence of the TAT polypeptide in the sample. Optionally, the sample may contain cells (which may be cancer cells) suspected of expressing the TAT polypeptide. The antibody, TAT binding oligopeptide or TAT binding organic molecule employed in the method may optionally be detectably labeled, attached to a solid support, or the like.

[0033] A further embodiment of the present invention is directed to a method of diagnosing the presence of a tumor in a mammal, wherein the method comprises detecting the level of expression of a gene encoding a TAT polypeptide (a) in a test sample of tissue cells obtained from said mammal, and (b) in a control sample of known normal non-cancerous cells of the same tissue origin or type, wherein a higher level of expression of the TAT polypeptide in the test sample, as compared to the control sample, is indicative of the presence of tumor in the mammal from which the test sample was obtained.

[0034] Another embodiment of the present invention is directed to a method of diagnosing the presence of a tumor in a mammal, wherein the method comprises (a) contacting a test sample comprising tissue cells obtained from the mammal with an antibody, oligopeptide or small organic molecule that binds to a TAT polypeptide and (b) detecting the formation of a complex between the antibody, oligopeptide or small organic molecule and the TAT polypeptide in the test sample, wherein the formation of a complex is indicative of the presence of a tumor in the mammal. Optionally, the antibody, TAT binding oligopeptide or TAT binding organic molecule employed is detectably labeled, attached to a solid support, or the like, and/or the test sample of tissue cells is obtained from an individual suspected of having a cancerous tumor.

[0035] Yet another embodiment of the present invention is directed to a method for treating or preventing a cell proliferative disorder associated with altered, preferably increased, expression or activity of a TAT polypeptide, the method comprising administering to a subject in need of such treatment an effective amount of an antagonist of a TAT polypeptide. Preferably, the cell proliferative disorder is cancer and the antagonist of the TAT polypeptide is an anti-TAT polypeptide antibody, TAT binding oligopeptide, TAT binding organic molecule or antisense oligonucleotide. Effective treatment or prevention of the cell proliferative disorder may be a result of direct killing or growth inhibition of cells that express a TAT polypeptide or by antagonizing the cell growth potentiating activity of a TAT polypeptide.

[0036] Yet another embodiment of the present invention is directed to a method of binding an antibody, oligopeptide or small organic molecule to a cell that expresses a TAT polypeptide, wherein the method comprises contacting a cell that expresses a TAT polypeptide with said antibody, oligopeptide or small organic molecule under conditions which are suitable for binding of the antibody, oligopeptide or small organic molecule to said TAT polypeptide and allowing binding therebetween.

[0037] Other embodiments of the present invention are directed to the use of (a) a TAT polypeptide, (b) a nucleic acid encoding a TAT polypeptide or a vector or host cell comprising that nucleic acid, (c) an anti-TAT polypeptide antibody, (d) a TAT-binding oligopeptide, or (e) a TAT-binding small organic molecule in the preparation of a medicament useful for (i) the therapeutic treatment or diagnostic detection of a cancer or tumor, or (ii) the therapeutic treatment or prevention of a cell proliferative disorder.

[0038] Another embodiment of the present invention is directed to a method for inhibiting the growth of a cancer cell, wherein the growth of said cancer cell is at least in part dependent upon the growth potentiating effect(s) of a TAT polypeptide (wherein the TAT polypeptide may be expressed either by the cancer cell itself or a cell that produces polypeptide(s) that have a growth potentiating effect on cancer cells), wherein the method comprises contacting the TAT polypeptide with an antibody, an oligopeptide or a small organic molecule that binds to the TAT polypeptide, thereby antagonizing the growth-potentiating activity of the TAT polypeptide and, in turn, inhibiting the growth of the cancer cell. Preferably the growth of the cancer cell is completely inhibited. Even more preferably, binding of the antibody, oligopeptide or small organic molecule to the TAT polypeptide induces the death of the cancer cell. Optionally, the antibody is a monoclonal antibody, antibody fragment, chimeric antibody, humanized antibody, or single-chain antibody. Antibodies, TAT binding oligopeptides and TAT binding organic molecules employed in the methods of the present invention may optionally be conjugated to a growth inhibitory agent or cytotoxic agent such as a toxin, including, for example, a maytansinoid or calicheamicin, an antibiotic, a radioactive isotope, a nucleolytic enzyme, or the like. The antibodies and TAT binding oligopeptides employed in the methods of the present invention may optionally be produced in CHO cells or bacterial cells.

[0039] Yet another embodiment of the present invention is directed to a method of therapeutically treating a tumor in a mammal, wherein the growth of said tumor is at least in part dependent upon the growth potentiating effect(s) of a TAT polypeptide, wherein the method comprises administering to the mammal a therapeutically effective amount of an antibody, an oligopeptide or a small organic molecule that binds to the TAT polypeptide, thereby antagonizing the growth potentiating activity of said TAT polypeptide and resulting in the effective therapeutic treatment of the tumor. Optionally, the antibody is a monoclonal antibody, antibody fragment, chimeric antibody, humanized antibody, or single-chain antibody. Antibodies, TAT binding oligopeptides and TAT binding organic molecules employed in the methods of the present invention may optionally be conjugated to a growth inhibitory agent or cytotoxic agent such as a toxin, including, for example, a maytansinoid or calicheamicin, an antibiotic, a radioactive isotope, a nucleolytic enzyme, or the like. The antibodies and oligopeptides employed in the methods of the present invention may optionally be produced in CHO cells or bacterial cells.

[0040] C. Further Additional Embodiments

[0041] In yet further embodiments, the invention is directed to the following set of potential claims for this application:

[0042] 1. Isolated nucleic acid having a nucleotide sequence that has at least 80% nucleic acid sequence identity to:

[0043] (a) a DNA molecule encoding the amino acid sequence shown in any one of FIGS. 82-158 (SEQ ID NOS:82-158);

[0044] (b) a DNA molecule encoding the amino acid sequence shown in any one of FIGS. 82-158 (SEQ ID NOS:82-158), lacking its associated signal peptide;

[0045] (c) a DNA molecule encoding an extracellular domain of the polypeptide shown in any one of FIGS. 82-158 (SEQ ID NOS:82-158), with its associated signal peptide;

[0046] (d) a DNA molecule encoding an extracellular domain of the polypeptide shown in any one of FIGS. 82-158 (SEQ ID NOS:82-158), lacking its associated signal peptide;

[0047] (e) the nucleotide sequence shown in any one of FIGS. 1-81 (SEQ ID NOS:1-81);

[0048] (f) the full-length coding region of the nucleotide sequence shown in any one of FIGS. 1-81 (SEQ ID NOS:1-81); or

[0049] (g) the complement of (a), (b), (c), (d), (e) or (f).

[0050] 2. Isolated nucleic acid having:

[0051] (a) a nucleotide sequence that encodes the amino acid sequence shown in any one of FIGS. 82-158 (SEQ ID NOS:82-158);

[0052] (b) a nucleotide sequence that encodes the amino acid sequence shown in any one of FIGS. 82-158 (SEQ ID NOS:82-158), lacking its associated signal peptide;

[0053] (c) a nucleotide sequence that encodes an extracellular domain of the polypeptide shown in any one of FIGS. 82-158 (SEQ ID NOS:82-158), with its associated signal peptide;

[0054] (d) a nucleotide sequence that encodes an extracellular domain of the polypeptide shown in any one of FIGS. 82-158 (SEQ ID NOS:82-158), lacking its associated signal peptide;

[0055] (e) the nucleotide sequence shown in any one of FIGS. 1-81 (SEQ ID NOS:1-81);

[0056] (f) the full-length coding region of the nucleotide sequence shown in any one of FIGS. 1-81 (SEQ ID NOS:1-81); or

[0057] (g) the complement of (a), (b), (c), (d), (e) or (f).

[0058] 3. Isolated nucleic acid that hybridizes to:

[0059] (a) a nucleic acid that encodes the amino acid sequence shown in any one of FIGS. 82-158 (SEQ ID NOS:82-158);

[0060] (b) a nucleic acid that encodes the amino acid sequence shown in any one of FIGS. 82-158 (SEQ ID NOS:82-158), lacking its associated signal peptide;

[0061] (c) a nucleic acid that encodes an extracellular domain of the polypeptide shown in any one of FIGS. 82-158 (SEQ ID NOS:82-158), with its associated signal peptide;

[0062] (d) a nucleic acid that encodes an extracellular domain of the polypeptide shown in any one of FIGS. 82-158 (SEQ ID NOS:82-158), lacking its associated signal peptide;

[0063] (e) the nucleotide sequence shown in any one of FIGS. 1-81 (SEQ ID NOS:1-81);

[0064] (f) the full-length coding region of the nucleotide sequence shown in any one of FIGS. 1-81 (SEQ ID NOS:1-81); or

[0065] (g) the complement of (a), (b), (c), (d), (e) or (f).

[0066] 4. The nucleic acid of claim 3, wherein the hybridization occurs under stringent conditions.

[0067] 5. The nucleic acid of claim 3 which is at least about 5 nucleotides in length.

[0068] 6. An expression vector comprising the nucleic acid of claim 1, 2 or 3.

[0069] 7. The expression vector of claim 6, wherein said nucleic acid is operably linked to control sequences recognized by a host cell transformed with the vector.

[0070] 8. A host cell comprising the expression vector of claim 7.

[0071] 9. The host cell of claim 8 which is a CHO cell, an E. coli cell or a yeast cell.

[0072] 10. A process for producing a polypeptide comprising culturing the host cell of claim 8 under conditions suitable for expression of said polypeptide and recovering said polypeptide from the cell culture.

[0073] 11. An isolated polypeptide having at least 80% amino acid sequence identity to:

[0074] (a) the polypeptide shown in any one of FIGS. 82-158 (SEQ ID NOS:82-158);

[0075] (b) the polypeptide shown in any one of FIGS. 82-158 (SEQ ID NOS:82-158), lacking its associated signal peptide;

[0076] (c) an extracellular domain of the polypeptide shown in any one of FIGS. 82-158 (SEQ ID NOS:82-158), with its associated signal peptide;

[0077] (d) an extracellular domain of the polypeptide shown in any one of FIGS. 82-158 (SEQ ID NOS:82-158), lacking its associated signal peptide;

[0078] (e) a polypeptide encoded by the nucleotide sequence shown in any one of FIGS. 1-81 (SEQ ID NOS:1-81); or

[0079] (f) a polypeptide encoded by the full-length coding region of the nucleotide sequence shown in any one of FIGS. 1-81 (SEQ ID NOS:1-81).

[0080] 12. An isolated polypeptide having:

[0081] (a) the amino acid sequence shown in any one of FIGS. 82-158 (SEQ ID NOS:82-158);

[0082] (b) the amino acid sequence shown in any one of FIGS. 82-158 (SEQ ID NOS:82-158), lacking its associated signal peptide sequence;

[0083] (c) an amino acid sequence of an extracellular domain of the polypeptide shown in any one of FIGS. 82-158 (SEQ ID NOS:82-158), with its associated signal peptide sequence;

[0084] (d) an amino acid sequence of an extracellular domain of the polypeptide shown in any one of FIGS. 82-158 (SEQ ID NOS:82-158), lacking its associated signal peptide sequence;

[0085] (e) an amino acid sequence encoded by the nucleotide sequence shown in any one of FIGS. 1-81 (SEQ ID NOS:1-81); or

[0086] (f) an amino acid sequence encoded by the full-length coding region of the nucleotide sequence shown in any one of FIGS. 1-81 (SEQ ID NOS:1-81).

[0087] 13. A chimeric polypeptide comprising the polypeptide of claim 11 or 12 fused to a heterologous polypeptide.

[0088] 14. The chimeric polypeptide of claim 13, wherein said heterologous polypeptide is an epitope tag sequence or an Fc region of an immunoglobulin.

[0089] 15. An isolated antibody that binds to a polypeptide having at least 80% amino acid sequence identity to:

[0090] (a) the polypeptide shown in any one of FIGS. 82-158 (SEQ ID NOS:82-158);

[0091] (b) the polypeptide shown in any one of FIGS. 82-158 (SEQ ID NOS:82-158), lacking its associated signal peptide;

[0092] (c) an extracellular domain of the polypeptide shown in any one of FIGS. 82-158 (SEQ ID NOS:82-158), with its associated signal peptide;

[0093] (d) an extracellular domain of the polypeptide shown in any one of FIGS. 82-158 (SEQ ID NOS:82-158), lacking its associated signal peptide;

[0094] (e) a polypeptide encoded by the nucleotide sequence shown in any one of FIGS. 1-81 (SEQ ID NOS:1-81); or

[0095] (f) a polypeptide encoded by the full-length coding region of the nucleotide sequence shown in any one of FIGS. 1-81 (SEQ ID NOS:1-81).

[0096] 16. An isolated antibody that binds to a polypeptide having:

[0097] (a) the amino acid sequence shown in any one of FIGS. 82-158 (SEQ ID NOS:82-158);

[0098] (b) the amino acid sequence shown in any one of FIGS. 82-158 (SEQ ID NOS:82-158), lacking its associated signal peptide sequence;

[0099] (c) an amino acid sequence of an extracellular domain of the polypeptide shown in any one of FIGS. 82-158 (SEQ ID NOS:82-158), with its associated signal peptide sequence;

[0100] (d) an amino acid sequence of an extracellular domain of the polypeptide shown in any one of FIGS. 82-158 (SEQ ID NOS:82-158), lacking its associated signal peptide sequence;

[0101] (e) an amino acid sequence encoded by the nucleotide sequence shown in any one of FIGS. 1-81 (SEQ ID NOS:1-81); or

[0102] (f) an amino acid sequence encoded by the full-length coding region of the nucleotide sequence shown in any one of FIGS. 1-81 (SEQ ID NOS:1-81).

[0103] 17. The antibody of claim 15 or 16 which is a monoclonal antibody.

[0104] 18. The antibody of claim 15 or 16 which is an antibody fragment.

[0105] 19. The antibody of claim 15 or 16 which is a chimeric or a humanized antibody.

[0106] 20. The antibody of claim 15 or 16 which is conjugated to a growth inhibitory agent.

[0107] 21. The antibody of claim 15 or 16 which is conjugated to a cytotoxic agent.

[0108] 22. The antibody of claim 21, wherein the cytotoxic agent is selected from the group consisting of toxins, antibiotics, radioactive isotopes and nucleolytic enzymes.

[0109] 23. The antibody of claim 21, wherein the cytotoxic agent is a toxin.

[0110] 24. The antibody of claim 23, wherein the toxin is selected from the group consisting of maytansinoid and calicheamicin.

[0111] 25. The antibody of claim 23, wherein the toxin is a maytansinoid.

[0112] 26. The antibody of claim 15 or 16 which is produced in bacteria.

[0113] 27. The antibody of claim 15 or 16 which is produced in CHO cells.

[0114] 28. The antibody of claim 15 or 16 which induces death of a cell to which it binds.

[0115] 29. The antibody of claim 15 or 16 which is detectably labeled.

[0116] 30. An isolated nucleic acid having a nucleotide sequence that encodes the antibody of claim 15 or 16.

[0117] 31. An expression vector comprising the nucleic acid of claim 30 operably linked to control sequences recognized by a host cell transformed with the vector.

[0118] 32. A host cell comprising the expression vector of claim 31.

[0119] 33. The host cell of claim 32 which is a CHO cell, an E. coli cell or a yeast cell.

[0120] 34. A process for producing an antibody comprising culturing the host cell of claim 32 under conditions suitable for expression of said antibody and recovering said antibody from the cell culture.

[0121] 35. An isolated oligopeptide that binds to a polypeptide having at least 80% amino acid sequence identity to:

[0122] (a) the polypeptide shown in any one of FIGS. 82-158 (SEQ ID NOS:82-158);

[0123] (b) the polypeptide shown in any one of FIGS. 82-158 (SEQ ID NOS:82-158), lacking its associated signal peptide;

[0124] (c) an extracellular domain of the polypeptide shown in any one of FIGS. 82-158 (SEQ ID NOS:82-158), with its associated signal peptide;

[0125] (d) an extracellular domain of the polypeptide shown in any one of FIGS. 82-158 (SEQ ID NOS:82-158), lacking its associated signal peptide;

[0126] (e) a polypeptide encoded by the nucleotide sequence shown in any one of FIGS. 1-81 (SEQ ID NOS:1-81); or

[0127] (f) a polypeptide encoded by the full-length coding region of the nucleotide sequence shown in any one of FIGS. 1-81 (SEQ ID NOS:1-81).

[0128] 36. An isolated oligopeptide that binds to a polypeptide having:

[0129] (a) the amino acid sequence shown in any one of FIGS. 82-158 (SEQ ID NOS:82-158);

[0130] (b) the amino acid sequence shown in any one of FIGS. 82-158 (SEQ ID NOS:82-158), lacking its associated signal peptide sequence;

[0131] (c) an amino acid sequence of an extracellular domain of the polypeptide shown in any one of FIGS. 82-158 (SEQ ID NOS:82-158), with its associated signal peptide sequence;

[0132] (d) an amino acid sequence of an extracellular domain of the polypeptide shown in any one of FIGS. 82-158 (SEQ ID NOS:82-158), lacking its associated signal peptide sequence;

[0133] (e) an amino acid sequence encoded by the nucleotide sequence shown in any one of FIGS. 1-81 (SEQ ID NOS:1-81); or

[0134] (f) an amino acid sequence encoded by the full-length coding region of the nucleotide sequence shown in any one of FIGS. 1-81 (SEQ ID NOS:1-81).

[0135] 37. The oligopeptide of claim 35 or 36 which is conjugated to a growth inhibitory agent.

[0136] 38. The oligopeptide of claim 35 or 36 which is conjugated to a cytotoxic agent.

[0137] 39. The oligopeptide of claim 38, wherein the cytotoxic agent is selected from the group consisting of toxins, antibiotics, radioactive isotopes and nucleolytic enzymes.

[0138] 40. The oligopeptide of claim 38, wherein the cytotoxic agent is a toxin.

[0139] 41. The oligopeptide of claim 40, wherein the toxin is selected from the group consisting of maytansinoid and calicheamicin.

[0140] 42. The oligopeptide of claim 40, wherein the toxin is a maytansinoid.

[0141] 43. The oligopeptide of claim 35 or 36 which induces death of a cell to which it binds.

[0142] 44. The oligopeptide of claim 35 or 36 which is detectably labeled.

[0143] 45. A TAT binding organic molecule that binds to a polypeptide having at least 80% amino acid sequence identity to:

[0144] (a) the polypeptide shown in any one of FIGS. 82-158 (SEQ ID NOS:82-158);

[0145] (b) the polypeptide shown in any one of FIGS. 82-158 (SEQ ID NOS:82-158), lacking its associated signal peptide;

[0146] (c) an extracellular domain of the polypeptide shown in any one of FIGS. 82-158 (SEQ ID NOS:82-158), with its associated signal peptide;

[0147] (d) an extracellular domain of the polypeptide shown in any one of FIGS. 82-158 (SEQ ID NOS:82-158), lacking its associated signal peptide;

[0148] (e) a polypeptide encoded by the nucleotide sequence shown in any one of FIGS. 1-81 (SEQ ID NOS:1-81); or

[0149] (f) a polypeptide encoded by the full-length coding region of the nucleotide sequence shown in any one of FIGS. 1-81 (SEQ ID NOS:1-81).

[0150] 46. The organic molecule of claim 45 that binds to a polypeptide having:

[0151] (a) the amino acid sequence shown in any one of FIGS. 82-158 (SEQ ID NOS:82-158);

[0152] (b) the amino acid sequence shown in any one of FIGS. 82-158 (SEQ ID NOS:82-158), lacking its associated signal peptide sequence;

[0153] (c) an amino acid sequence of an extracellular domain of the polypeptide shown in any one of FIGS. 82-158 (SEQ ID NOS:82-158), with its associated signal peptide sequence;

[0154] (d) an amino acid sequence of an extracellular domain of the polypeptide shown in any one of FIGS. 82-158 (SEQ ID NOS:82-158), lacking its associated signal peptide sequence;

[0155] (e) an amino acid sequence encoded by the nucleotide sequence shown in any one of FIGS. 1-81 (SEQ ID NOS:1-81); or

[0156] (f) an amino acid sequence encoded by the full-length coding region of the nucleotide sequence shown in any one of FIGS. 1-81 (SEQ ID NOS:1-81).

[0157] 47. The organic molecule of claim 45 or 46 which is conjugated to a growth inhibitory agent.

[0158] 48. The organic molecule of claim 45 or 46 which is conjugated to a cytotoxic agent.

[0159] 49. The organic molecule of claim 48, wherein the cytotoxic agent is selected from the group consisting of toxins, antibiotics, radioactive isotopes and nucleolytic enzymes.

[0160] 50. The organic molecule of claim 48, wherein the cytotoxic agent is a toxin.

[0161] 51. The organic molecule of claim 50, wherein the toxin is selected from the group consisting of maytansinoid and calicheamicin.

[0162] 52. The organic molecule of claim 50, wherein the toxin is a maytansinoid.

[0163] 53. The organic molecule of claim 45 or 46 which induces death of a cell to which it binds.

[0164] 54. The organic molecule of claim 45 or 46 which is detectably labeled.

[0165] 55. A composition of matter comprising:

[0166] (a) the polypeptide of claim 11;

[0167] (b) the polypeptide of claim 12;

[0168] (c) the chimeric polypeptide of claim 13;

[0169] (d) the antibody of claim 15;

[0170] (e) the antibody of claim 16;

[0171] (f) the oligopeptide of claim 35;

[0172] (g) the oligopeptide of claim 36;

[0173] (h) the TAT binding organic molecule of claim 45; or

[0174] (i) the TAT binding organic molecule of claim 46; in combination with a carrier.

[0175] 56. The composition of matter of claim 55, wherein said carrier is a pharmaceutically acceptable carrier.

[0176] 57. An article of manufacture comprising:

[0177] (a) a container; and

[0178] (b) the composition of matter of claim 55 contained within said container.

[0179] 58. The article of manufacture of claim 57 further comprising a label affixed to said container, or a package insert included with said container, referring to the use of said composition of matter for the therapeutic treatment of or the diagnostic detection of a cancer.

[0180] 59. A method of inhibiting the growth of a cell that expresses a protein having at least 80% amino acid sequence identity to:

[0181] (a) the polypeptide shown in any one of FIGS. 82-158 (SEQ ID NOS:82-158);

[0182] (b) the polypeptide shown in any one of FIGS. 82-158 (SEQ ID NOS:82-158), lacking its associated signal peptide;

[0183] (c) an extracellular domain of the polypeptide shown in any one of FIGS. 82-158 (SEQ ID NOS:82-158), with its associated signal peptide;

[0184] (d) an extracellular domain of the polypeptide shown in any one of FIGS. 82-158 (SEQ ID NOS:82-158), lacking its associated signal peptide;

[0185] (e) a polypeptide encoded by the nucleotide sequence shown in any one of FIGS. 1-81 (SEQ ID NOS:1-81); or

[0186] (f) a polypeptide encoded by the full-length coding region of the nucleotide sequence shown in any one of FIGS. 1-81 (SEQ ID NOS:1-81), said method comprising contacting said cell with an antibody, oligopeptide or organic molecule that binds to said protein, the binding of said antibody, oligopeptide or organic molecule to said protein thereby causing an inhibition of growth of said cell.

[0187] 60. The method of claim 59, wherein said antibody is a monoclonal antibody.

[0188] 61. The method of claim 59, wherein said antibody is an antibody fragment.

[0189] 62. The method of claim 59, wherein said antibody is a chimeric or a humanized antibody.

[0190] 63. The method of claim 59, wherein said antibody, oligopeptide or organic molecule is conjugated to a growth inhibitory agent.

[0191] 64. The method of claim 59, wherein said antibody, oligopeptide or organic molecule is conjugated to a cytotoxic agent.

[0192] 65. The method of claim 64, wherein said cytotoxic agent is selected from the group consisting of toxins, antibiotics, radioactive isotopes and nucleolytic enzymes.

[0193] 66. The method of claim 64, wherein the cytotoxic agent is a toxin.

[0194] 67. The method of claim 66, wherein the toxin is selected from the group consisting of maytansinoid and calicheamicin.

[0195] 68. The method of claim 66, wherein the toxin is a maytansinoid.

[0196] 69. The method of claim 59, wherein said antibody is produced in bacteria.

[0197] 70. The method of claim 59, wherein said antibody is produced in CHO cells.

[0198] 71. The method of claim 59, wherein said cell is a cancer cell.

[0199] 72. The method of claim 71, wherein said cancer cell is further exposed to radiation treatment or a chemotherapeutic agent.

[0200] 73. The method of claim 71, wherein said cancer cell is selected from the group consisting of a breast cancer cell, a colorectal cancer cell, a lung cancer cell, an ovarian cancer cell, a central nervous system cancer cell, a liver cancer cell, a bladder cancer cell, a pancreatic cancer cell, a cervical cancer cell, a melanoma cell and a leukemia cell.

[0201] 74. The method of claim 71, wherein said protein is more abundantly expressed by said cancer cell as compared to a normal cell of the same tissue origin.

[0202] 75. The method of claim 59 which causes the death of said cell.

[0203] 76. The method of claim 59, wherein said protein has:

[0204] (a) the amino acid sequence shown in any one of FIGS. 82-158 (SEQ ID NOS:82-158);

[0205] (b) the amino acid sequence shown in any one of FIGS. 82-158 (SEQ ID NOS:82-158), lacking its associated signal peptide sequence;

[0206] (c) an amino acid sequence of an extracellular domain of the polypeptide shown in any one of FIGS. 82-158 (SEQ ID NOS:82-158), with its associated signal peptide sequence;

[0207] (d) an amino acid sequence of an extracellular domain of the polypeptide shown in any one of FIGS. 82-158 (SEQ ID NOS:82-158), lacking its associated signal peptide sequence;

[0208] (e) an amino acid sequence encoded by the nucleotide sequence shown in any one of FIGS. 1-81 (SEQ ID NOS:1-81); or

[0209] (f) an amino acid sequence encoded by the full-length coding region of the nucleotide sequence shown in any one of FIGS. 1-81 (SEQ ID NOS:1-81).

[0210] 77. A method of therapeutically treating a mammal having a cancerous tumor comprising cells that express a protein having at least 80% amino acid sequence identity to:

[0211] (a) the polypeptide shown in any one of FIGS. 82-158 (SEQ ID NOS:82-158);

[0212] (b) the polypeptide shown in any one of FIGS. 82-158 (SEQ ID NOS:82-158), lacking its associated signal peptide;

[0213] (c) an extracellular domain of the polypeptide shown in any one of FIGS. 82-158 (SEQ ID NOS:82-158), with its associated signal peptide;

[0214] (d) an extracellular domain of the polypeptide shown in any one of FIGS. 82-158 (SEQ ID NOS:82-158), lacking its associated signal peptide;

[0215] (e) a polypeptide encoded by the nucleotide sequence shown in any one of FIGS. 1-81 (SEQ ID NOS:1-81); or

[0216] (f) a polypeptide encoded by the full-length coding region of the nucleotide sequence shown in any one of FIGS. 1-81 (SEQ ID NOS:1-81), said method comprising administering to said mammal a therapeutically effective amount of an antibody, oligopeptide or organic molecule that binds to said protein, thereby effectively treating said mammal.

[0217] 78. The method of claim 77, wherein said antibody is a monoclonal antibody.

[0218] 79. The method of claim 77, wherein said antibody is an antibody fragment.

[0219] 80. The method of claim 77, wherein said antibody is a chimeric or a humanized antibody.

[0220] 81. The method of claim 77, wherein said antibody, oligopeptide or organic molecule is conjugated to a growth inhibitory agent.

[0221] 82. The method of claim 77, wherein said antibody, oligopeptide or organic molecule is conjugated to a cytotoxic agent.

[0222] 83. The method of claim 82, wherein said cytotoxic agent is selected from the group consisting of toxins, antibiotics, radioactive isotopes and nucleolytic enzymes.

[0223] 84. The method of claim 82, wherein the cytotoxic agent is a toxin.

[0224] 85. The method of claim 84, wherein the toxin is selected from the group consisting of maytansinoid and calicheamicin.

[0225] 86. The method of claim 84, wherein the toxin is a maytansinoid.

[0226] 87. The method of claim 77, wherein said antibody is produced in bacteria.

[0227] 88. The method of claim 77, wherein said antibody is produced in CHO cells.

[0228] 89. The method of claim 77, wherein said tumor is further exposed to radiation treatment or a chemotherapeutic agent.

[0229] 90. The method of claim 77, wherein said tumor is a breast tumor, a colorectal tumor, a lung tumor, an ovarian tumor, a central nervous system tumor, a liver tumor, a bladder tumor, a pancreatic tumor, or a cervical tumor.

[0230] 91. The method of claim 77, wherein said protein is more abundantly expressed by the cancerous cells of said tumor as compared to a normal cell of the same tissue origin.

[0231] 92. The method of claim 77, wherein said protein has:

[0232] (a) the amino acid sequence shown in any one of FIGS. 82-158 (SEQ ID NOS:82-158);

[0233] (b) the amino acid sequence shown in any one of FIGS. 82-158 (SEQ ID NOS:82-158), lacking its associated signal peptide sequence;

[0234] (c) an amino acid sequence of an extracellular domain of the polypeptide shown in any one of FIGS. 2582-158 (SEQ ID NOS:82-158), with its associated signal peptide sequence;

[0235] (d) an amino acid sequence of an extracellular domain of the polypeptide shown in any one of FIGS. 82-158 (SEQ ID NOS:82-158), lacking its associated signal peptide sequence;

[0236] (e) an amino acid sequence encoded by the nucleotide sequence shown in any one of FIGS. 1-81 (SEQ ID NOS:1-81); or

[0237] (f) an amino acid sequence encoded by the full-length coding region of the nucleotide sequence shown in any one of FIGS. 1-81 (SEQ ID NOS:1-81).

[0238] 93. A method of determining the presence of a protein in a sample suspected of containing said protein, wherein said protein has at least 80% amino acid sequence identity to:

[0239] (a) the polypeptide shown in any one of FIGS. 82-158 (SEQ ID NOS:82-158);

[0240] (b) the polypeptide shown in any one of FIGS. 82-158 (SEQ ID NOS:82-158), lacking its associated signal peptide;

[0241] (c) an extracellular domain of the polypeptide shown in any one of FIGS. 82-158 (SEQ ID NOS:82-158), with its associated signal peptide;

[0242] (d) an extracellular domain of the polypeptide shown in any one of FIGS. 82-158 (SEQ ID NOS:82-158), lacking its associated signal peptide;

[0243] (e) a polypeptide encoded by the nucleotide sequence shown in any one of FIGS. 1-81 (SEQ ID NOS:1-81); or

[0244] (f) a polypeptide encoded by the full-length coding region of the nucleotide sequence shown in any one of FIGS. 1-81 (SEQ ID NOS:1-81), said method comprising exposing said sample to an antibody, oligopeptide or organic molecule that binds to said protein and determining binding of said antibody, oligopeptide or organic molecule to said protein in said sample, wherein binding of the antibody, oligopeptide or organic molecule to said protein is indicative of the presence of said protein in said sample.

[0245] 94. The method of claim 93, wherein said sample comprises a cell suspected of expressing said protein.

[0246] 95. The method of claim 94, wherein said cell is a cancer cell.

[0247] 96. The method of claim 93, wherein said antibody, oligopeptide or organic molecule is detectably labeled.

[0248] 97. The method of claim 93, wherein said protein has:

[0249] (a) the amino acid sequence shown in any one of FIGS. 82-158 (SEQ ID NOS:82-158);

[0250] (b) the amino acid sequence shown in any one of FIGS. 82-158 (SEQ ID NOS:82-158), lacking its associated signal peptide sequence;

[0251] (c) an amino acid sequence of an extracellular domain of the polypeptide shown in any one of FIGS. 82-158 (SEQ ID NOS:82-158), with its associated signal peptide sequence;

[0252] (d) an amino acid sequence of an extracellular domain of the polypeptide shown in any one of FIGS. 82-158 (SEQ ID NOS:82-158), lacking its associated signal peptide sequence;

[0253] (e) an amino acid sequence encoded by the nucleotide sequence shown in any one of FIGS. 1-81 (SEQ ID NOS:1-81); or

[0254] (f) an amino acid sequence encoded by the full-length coding region of the nucleotide sequence shown in any one of FIGS. 1-81 (SEQ ID NOS:1-81).

[0255] 98. A method of diagnosing the presence of a tumor in a mammal, said method comprising determining the level of expression of a gene encoding a protein having at least 80% amino acid sequence identity to:

[0256] (a) the polypeptide shown in any one of FIGS. 82-158 (SEQ ID NOS:82-158);

[0257] (b) the polypeptide shown in any one of FIGS. 82-158 (SEQ ID NOS:82-158), lacking its associated signal peptide;

[0258] (c) an extracellular domain of the polypeptide shown in any one of FIGS. 82-158 (SEQ ID NOS:82-158), with its associated signal peptide;

[0259] (d) an extracellular domain of the polypeptide shown in any one of FIGS. 82-158 (SEQ ID NOS:82-158), lacking its associated signal peptide;

[0260] (e) a polypeptide encoded by the nucleotide sequence shown in any one of FIGS. 1-81 (SEQ ID NOS:1-81); or

[0261] (f) a polypeptide encoded by the full-length coding region of the nucleotide sequence shown in any one of FIGS. 1-81 (SEQ ID NOS:1-81), in a test sample of tissue cells obtained from said mammal and in a control sample of known normal cells of the same tissue origin, wherein a higher level of expression of said protein in the test sample, as compared to the control sample, is indicative of the presence of tumor in the mammal from which the test sample was obtained.

[0262] 99. The method of claim 98, wherein the step of determining the level of expression of a gene encoding said protein comprises employing an oligonucleotide in an in situ hybridization or RT-PCR analysis.

[0263] 100. The method of claim 98, wherein the step determining the level of expression of a gene encoding said protein comprises employing an antibody in an immunohistochemistry or Western blot analysis.

[0264] 101. The method of claim 98, wherein said protein has:

[0265] (a) the amino acid sequence shown in any one of FIGS. 82-158 (SEQ ID NOS:82-158);

[0266] (b) the amino acid sequence shown in any one of FIGS. 82-158 (SEQ ID NOS:82-158), lacking its associated signal peptide sequence;

[0267] (c) an amino acid sequence of an extracellular domain of the polypeptide shown in any one of FIGS. 82-158 (SEQ ID NOS:82-158), with its associated signal peptide sequence;

[0268] (d) an amino acid sequence of an extracellular domain of the polypeptide shown in any one of FIGS. 82-158 (SEQ ID NOS:82-158), lacking its associated signal peptide sequence;

[0269] (e) an amino acid sequence encoded by the nucleotide sequence shown in any one of FIGS. 1-81 (SEQ ID NOS:1-81); or

[0270] (f) an amino acid sequence encoded by the full-length coding region of the nucleotide sequence shown in any one of FIGS. 1-81 (SEQ ID NOS:1-81).

[0271] 102. A method of diagnosing the presence of a tumor in a mammal, said method comprising contacting a test sample of tissue cells obtained from said mammal with an antibody, oligopeptide or organic molecule that binds to a protein having at least 80% amino acid sequence identity to:

[0272] (a) the polypeptide shown in any one of FIGS. 82-158 (SEQ ID NOS:82-158);

[0273] (b) the polypeptide shown in any one of FIGS. 82-158 (SEQ ID NOS:82-158), lacking its associated signal peptide;

[0274] (c) an extracellular domain of the polypeptide shown in any one of FIGS. 82-158 (SEQ ID NOS:82-158), with its associated signal peptide;

[0275] (d) an extracellular domain of the polypeptide shown in any one of FIGS. 82-158 (SEQ ID NOS:82-158), lacking its associated signal peptide;

[0276] (e) a polypeptide encoded by the nucleotide sequence shown in any one of FIGS. 1-81 (SEQ ID NOS:1-81); or

[0277] (f) a polypeptide encoded by the full-length coding region of the nucleotide sequence shown in any one of FIGS. 1-81 (SEQ ID NOS:1-81), and detecting the formation of a complex between said antibody, oligopeptide or organic molecule and said protein in the test sample, wherein the formation of a complex is indicative of the presence of a tumor in said mammal.

[0278] 103. The method of claim 102, wherein said antibody, oligopeptide or organic molecule is detectably labeled.

[0279] 104. The method of claim 102, wherein said test sample of tissue cells is obtained from an individual suspected of having a cancerous tumor.

[0280] 105. The method of claim 102, wherein said protein has:

[0281] (a) the amino acid sequence shown in any one of FIGS. 82-158 (SEQ ID NOS:82-158);

[0282] (b) the amino acid sequence shown in any one of FIGS. 82-158 (SEQ ID NOS:82-158), lacking its associated signal peptide sequence;

[0283] (c) an amino acid sequence of an extracellular domain of the polypeptide shown in any one of FIGS. 82-158 (SEQ ID NOS:82-158), with its associated signal peptide sequence;

[0284] (d) an amino acid sequence of an extracellular domain of the polypeptide shown in any one of FIGS. 82-158 (SEQ ID NOS:82-158), lacking its associated signal peptide sequence;

[0285] (e) an amino acid sequence encoded by the nucleotide sequence shown in any one of FIGS. 1-81 (SEQ ID NOS:1-81); or

[0286] (f) an amino acid sequence encoded by the full-length coding region of the nucleotide sequence shown in any one of FIGS. 1-81 (SEQ ID NOS:1-81).

[0287] 106. A method for treating or preventing a cell proliferative disorder associated with increased expression or activity of a protein having at least 80% amino acid sequence identity to:

[0288] (a) the polypeptide shown in any one of FIGS. 82-158 (SEQ ID NOS:82-158);

[0289] (b) the polypeptide shown in any one of FIGS. 82-158 (SEQ ID NOS:82-158), lacking its associated signal peptide;

[0290] (c) an extracellular domain of the polypeptide shown in any one of FIGS. 82-158 (SEQ ID NOS:82-158), with its associated signal peptide;

[0291] (d) an extracellular domain of the polypeptide shown in any one of FIGS. 82-158 (SEQ ID NOS:82-158), lacking its associated signal peptide;

[0292] (e) a polypeptide encoded by the nucleotide sequence shown in any one of FIGS. 1-81 (SEQ ID NOS:1-81); or

[0293] (f) a polypeptide encoded by the full-length coding region of the nucleotide sequence shown in any one of FIGS. 1-81 (SEQ ID NOS:1-81), said method comprising administering to a subject in need of such treatment an effective amount of an antagonist of said protein, thereby effectively treating or preventing said cell proliferative disorder.

[0294] 107. The method of claim 106, wherein said cell proliferative disorder is cancer.

[0295] 108. The method of claim 106, wherein said antagonist is an anti-TAT polypeptide antibody, TAT binding oligopeptide, TAT binding organic molecule or antisense oligonucleotide.

[0296] 109. A method of binding an antibody, oligopeptide or organic molecule to a cell that expresses a protein having at least 80% amino acid sequence identity to:

[0297] (a) the polypeptide shown in any one of FIGS. 82-158 (SEQ ID NOS:82-158);

[0298] (b) the polypeptide shown in any one of FIGS. 82-158 (SEQ ID NOS:82-158), lacking its associated signal peptide;

[0299] (c) an extracellular domain of the polypeptide shown in any one of FIGS. 82-158 (SEQ ID NOS:82-158), with its associated signal peptide;

[0300] (d) an extracellular domain of the polypeptide shown in any one of FIGS. 82-158 (SEQ ID NOS:82-158), lacking its associated signal peptide;

[0301] (e) a polypeptide encoded by the nucleotide sequence shown in any one of FIGS. 1-81 (SEQ ID NOS:1-81); or

[0302] (f) a polypeptide encoded by the full-length coding region of the nucleotide sequence shown in any one of FIGS. 1-81 (SEQ ID NOS:1-81), said method comprising contacting said cell with an antibody, oligopeptide or organic molecule that binds to said protein and allowing the binding of the antibody, oligopeptide or organic molecule to said protein to occur, thereby binding said antibody, oligopeptide or organic molecule to said cell.

[0303] 110. The method of claim 109, wherein said antibody is a monoclonal antibody.

[0304] 111. The method of claim 109, wherein said antibody is an antibody fragment.

[0305] 112. The method of claim 109, wherein said antibody is a chimeric or a humanized antibody.

[0306] 113. The method of claim 109, wherein said antibody, oligopeptide or organic molecule is conjugated to a growth inhibitory agent.

[0307] 114. The method of claim 109, wherein said antibody, oligopeptide or organic molecule is conjugated to a cytotoxic agent.

[0308] 115. The method of claim 114, wherein said cytotoxic agent is selected from the group consisting of toxins, antibiotics, radioactive isotopes and nucleolytic enzymes.

[0309] 116. The method of claim 114, wherein the cytotoxic agent is a toxin.

[0310] 117. The method of claim 116, wherein the toxin is selected from the group consisting of maytansinoid and calicheamicin.

[0311] 118. The method of claim 116, wherein the toxin is a maytansinoid.

[0312] 119. The method of claim 109, wherein said antibody is produced in bacteria.

[0313] 120. The method of claim 109, wherein said antibody is produced in CHO cells.

[0314] 121. The method of claim 109, wherein said cell is a cancer cell.

[0315] 122. The method of claim 121, wherein said cancer cell is further exposed to radiation treatment or a chemotherapeutic agent.

[0316] 123. The method of claim 121, wherein said cancer cell is selected from the group consisting of a breast cancer cell, a colorectal cancer cell, a lung cancer cell, an ovarian cancer cell, a central nervous system cancer cell, a liver cancer cell, a bladder cancer cell, a pancreatic cancer cell, a cervical cancer cell, a melanoma cell and a leukemia cell.

[0317] 124. The method of claim 123, wherein said protein is more abundantly expressed by said cancer cell as compared to a normal cell of the same tissue origin.

[0318] 125. The method of claim 109 which causes the death of said cell.

[0319] 126. Use of a nucleic acid as claimed in any of claims 1 to 5 or 30 in the preparation of a medicament for the therapeutic treatment or diagnostic detection of a cancer.

[0320] 127. Use of a nucleic acid as claimed in any of claims 1 to 5 or 30 in the preparation of a medicament for treating a tumor.

[0321] 128. Use of a nucleic acid as claimed in any of claims 1 to 5 or 30 in the preparation of a medicament for treatment or prevention of a cell proliferative disorder.

[0322] 129. Use of an expression vector as claimed in any of claims 6, 7 or 31 in the preparation of a medicament for the therapeutic treatment or diagnostic detection of a cancer.

[0323] 130. Use of an expression vector as claimed in any of claims 6, 7 or 31 in the preparation of medicament for treating a tumor.

[0324] 131. Use of an expression vector as claimed in any of claims 6, 7 or 31 in the preparation of a medicament for treatment or prevention of a cell proliferative disorder.

[0325] 132. Use of a host cell as claimed in any of claims 8, 9, 32, or 33 in the preparation of a medicament for the therapeutic treatment or diagnostic detection of a cancer.

[0326] 133. Use of a host cell as claimed in any of claims 8, 9, 32 or 33 in the preparation of a medicament for treating a tumor.

[0327] 134. Use of a host cell as claimed in any of claims 8, 9, 32 or 33 in the preparation of a medicament for treatment or prevention of a cell proliferative disorder.

[0328] 135. Use of a polypeptide as claimed in any of claims 11 to 14 in the preparation of a medicament for the therapeutic treatment or diagnostic detection of a cancer.

[0329] 136. Use of a polypeptide as claimed in any of claims 11 to 14 in the preparation of a medicament for treating a tumor.

[0330] 137. Use of a polypeptide as claimed in any of claims 11 to 14 in the preparation of a medicament for treatment or prevention of a cell proliferative disorder.

[0331] 138. Use of an antibody as claimed in any of claims 15 to 29 in the preparation of a medicament for the therapeutic treatment or diagnostic detection of a cancer.

[0332] 139. Use of an antibody as claimed in any of claims 15 to 29 in the preparation of a medicament for treating a tumor.

[0333] 140. Use of an antibody as claimed in any of claims 15 to 29 in the preparation of a medicament for treatment or prevention of a cell proliferative disorder.

[0334] 141. Use of an oligopeptide as claimed in any of claims 35 to 44 in the preparation of a medicament for the therapeutic treatment or diagnostic detection of a cancer.

[0335] 142. Use of an oligopeptide as claimed in any of claims 35 to 44 in the preparation of a medicament for treating a tumor.

[0336] 143. Use of an oligopeptide as claimed in any of claims 35 to 44 in the preparation of a medicament for treatment or prevention of a cell proliferative disorder.

[0337] 144. Use of a TAT binding organic molecule as claimed in any of claims 45 to 54 in the preparation of a medicament for the therapeutic treatment or diagnostic detection of a cancer.

[0338] 145. Use of a TAT binding organic molecule as claimed in any of claims 45 to 54 in the preparation of a medicament for treating a tumor.

[0339] 146. Use of a TAT binding organic molecule as claimed in any of claims 45 to 54 in the preparation of a medicament for treatment or prevention of a cell proliferative disorder.

[0340] 147. Use of a composition of matter as claimed in any of claims 55 or 56 in the preparation of a medicament for the therapeutic treatment or diagnostic detection of a cancer.

[0341] 148. Use of a composition of matter as claimed in any of claims 55 or 56 in the preparation of a medicament for treating a tumor.

[0342] 149. Use of a composition of matter as claimed in any of claims 55 or 56 in the preparation of a medicament for treatment or prevention of a cell proliferative disorder.

[0343] 150. Use of an article of manufacture as claimed in any of claims 57 or 58 in the preparation of a medicament for the therapeutic treatment or diagnostic detection of a cancer.

[0344] 151. Use of an article of manufacture as claimed in any of claims 57 or 58 in the preparation of a medicament for treating a tumor.

[0345] 152. Use of an article of manufacture as claimed in any of claims 57 or 58 in the preparation of a medicament for treatment or prevention of a cell proliferative disorder.

[0346] 153. A method for inhibiting the growth of a cell, wherein the growth of said cell is at least in part dependent upon a growth potentiating effect of a protein having at least 80% amino acid sequence identity to:

[0347] (a) the polypeptide shown in any one of FIGS. 82-158 (SEQ ID NOS:82-158);

[0348] (b) the polypeptide shown in any one of FIGS. 82-158 (SEQ ID NOS:82-158), lacking its associated signal peptide;

[0349] (c) an extracellular domain of the polypeptide shown in any one of FIGS. 82-158 (SEQ ID NOS:82-158), with its associated signal peptide;

[0350] (d) an extracellular domain of the polypeptide shown in any one of FIGS. 82-158 (SEQ ID NOS:82-158), lacking its associated signal peptide;

[0351] (e) a polypeptide encoded by the nucleotide sequence shown in any one of FIGS. 1-81 (SEQ ID NOS:1-81); or

[0352] (f) a polypeptide encoded by the full-length coding region of the nucleotide sequence shown in any one of FIGS. 1-81 (SEQ ID NOS:1-81), said method comprising contacting said protein with an antibody, oligopeptide or organic molecule that binds to said protein, there by inhibiting the growth of said cell.

[0353] 154. The method of claim 153, wherein said cell is a cancer cell.

[0354] 155. The method of claim 153, wherein said protein is expressed by said cell.

[0355] 156. The method of claim 153, wherein the binding of said antibody, oligopeptide or organic molecule to said protein antagonizes a cell growth-potentiating activity of said protein.

[0356] 157. The method of claim 153, wherein the binding of said antibody, oligopeptide or organic molecule to said protein induces the death of said cell.

[0357] 158. The method of claim 153, wherein said antibody is a monoclonal antibody.

[0358] 159. The method of claim 153, wherein said antibody is an antibody fragment.

[0359] 160. The method of claim 153, wherein said antibody is a chimeric or a humanized antibody.

[0360] 161. The method of claim 153, wherein said antibody, oligopeptide or organic molecule is conjugated to a growth inhibitory agent.

[0361] 162. The method of claim 153, wherein said antibody, oligopeptide or organic molecule is conjugated to a cytotoxic agent.

[0362] 163. The method of claim 162, wherein said cytotoxic agent is selected from the group consisting of toxins, antibiotics, radioactive isotopes and nucleolytic enzymes.

[0363] 164. The method of claim 162, wherein the cytotoxic agent is a toxin.

[0364] 165. The method of claim 164, wherein the toxin is selected from the group consisting of maytansinoid and calicheamicin.

[0365] 166. The method of claim 164, wherein the toxin is a maytansinoid.

[0366] 167. The method of claim 153, wherein said antibody is produced in bacteria.

[0367] 168. The method of claim 153, wherein said antibody is produced in CHO cells.

[0368] 169. The method of claim 153, wherein said protein has:

[0369] (a) the amino acid sequence shown in any one of FIGS. 82-158 (SEQ ID NOS:82-158);

[0370] (b) the amino acid sequence shown in any one of FIGS. 82-158 (SEQ ID NOS:82-158), lacking its associated signal peptide sequence;

[0371] (c) an amino acid sequence of an extracellular domain of the polypeptide shown in any one of FIGS. 82-158 (SEQ ID NOS:82-158), with its associated signal peptide sequence;

[0372] (d) an amino acid sequence of an extracellular domain of the polypeptide shown in any one of FIGS. 82-158 (SEQ ID NOS:82-158), lacking its associated signal peptide sequence;

[0373] (e) an amino acid sequence encoded by the nucleotide sequence shown in any one of FIGS. 1-81 (SEQ ID NOS:1-81); or

[0374] (f) an amino acid sequence encoded by the full-length coding region of the nucleotide sequence shown in any one of FIGS. 1-81 (SEQ ID NOS:1-81).

[0375] 170. A method of therapeutically treating a tumor in a mammal, wherein the growth of said tumor is at least in part dependent upon a growth potentiating effect of a protein having at least 80% amino acid sequence identity to:

[0376] (a) the polypeptide shown in any one of FIGS. 82-158 (SEQ ID NOS:82-158);

[0377] (b) the polypeptide shown in any one of FIGS. 82-158 (SEQ ID NOS:82-158), lacking its associated signal peptide;

[0378] (c) an extracellular domain of the polypeptide shown in any one of FIGS. 82-158 (SEQ ID NOS:82-158), with its associated signal peptide;

[0379] (d) an extracellular domain of the polypeptide shown in any one of FIGS. 82-158 (SEQ ID NOS:82-158), lacking its associated signal peptide;

[0380] (e) a polypeptide encoded by the nucleotide sequence shown in any one of FIGS. 1-81 (SEQ ID NOS:1-81); or

[0381] (f) a polypeptide encoded by the full-length coding region of the nucleotide sequence shown in any one of FIGS. 1-81 (SEQ ID NOS:1-81), said method comprising contacting said protein with an antibody, oligopeptide or organic molecule that binds to said protein, thereby effectively treating said tumor.

[0382] 171. The method of claim 170, wherein said protein is expressed by cells of said tumor.

[0383] 172. The method of claim 170, wherein the binding of said antibody, oligopeptide or organic molecule to said protein antagonizes a cell growth-potentiating activity of said protein.

[0384] 173. The method of claim 170, wherein said antibody is a monoclonal antibody.

[0385] 174. The method of claim 170, wherein said antibody is an antibody fragment.

[0386] 175. The method of claim 170, wherein said antibody is a chimeric or a humanized antibody.

[0387] 176. The method of claim 170, wherein said antibody, oligopeptide or organic molecule is conjugated to a growth inhibitory agent.

[0388] 177. The method of claim 170, wherein said antibody, oligopeptide or organic molecule is conjugated to a cytotoxic agent.

[0389] 178. The method of claim 177, wherein said cytotoxic agent is selected from the group consisting of toxins, antibiotics, radioactive isotopes and nucleolytic enzymes.

[0390] 179. The method of claim 177, wherein the cytotoxic agent is a toxin.

[0391] 180. The method of claim 179, wherein the toxin is selected from the group consisting of maytansinoid and calicheamicin.

[0392] 181. The method of claim 179, wherein the toxin is a maytansinoid.

[0393] 182. The method of claim 170, wherein said antibody is produced in bacteria.

[0394] 183. The method of claim 170, wherein said antibody is produced in CHO cells.

[0395] 184. The method of claim 170, wherein said protein has:

[0396] (a) the amino acid sequence shown in any one of FIGS. 82-158 (SEQ ID NOS:82-158);

[0397] (b) the amino acid sequence shown in any one of FIGS. 82-158 (SEQ ID NOS:82-158), lacking its associated signal peptide sequence;

[0398] (c) an amino acid sequence of an extracellular domain of the polypeptide shown in any one of FIGS. 82-158 (SEQ ID NOS:82-158), with its associated signal peptide sequence;

[0399] (d) an amino acid sequence of an extracellular domain of the polypeptide shown in any one of FIGS. 82-158 (SEQ ID NOS:82-158), lacking its associated signal peptide sequence;

[0400] (e) an amino acid sequence encoded by the nucleotide sequence shown in any one of FIGS. 1-81 (SEQ ID NOS:1-81); or

[0401] (f) an amino acid sequence encoded by the full-length coding region of the nucleotide sequence shown in any one of FIGS. 1-81 (SEQ ID NOS:1-81).

[0402] Yet further embodiments of the present invention will be evident to the skilled artisan upon a reading of the present specification.

### BRIEF DESCRIPTION OF THE DRAWINGS

[0403] FIG. 1 shows a nucleotide sequence (SEQ ID NO: 1) of a TAT306 cDNA, wherein SEQ ID NO: 1 is a clone designated herein as “DNA103367”.

[0404] FIG. 2 shows a nucleotide sequence (SEQ ID NO:2) of a TAT307 cDNA, wherein SEQ ID NO:2 is a clone designated herein as “DNA108628”.

[0405] FIG. 3 shows a nucleotide sequence (SEQ ID NO:3) of a TAT308 cDNA, wherein SEQ ID NO:3 is a clone designated herein as “DNA108720”.

[0406] FIG. 4 shows a nucleotide sequence (SEQ ID NO:4) of a TAT309 cDNA, wherein SEQ ID NO:4 is a clone designated herein as “DNA1 11260”.

[0407] FIG. 5 shows a nucleotide sequence (SEQ ID NO:5) of a TAT310 cDNA, wherein SEQ ID NO:5 is a clone designated herein as “DNA150051”.

[0408] FIG. 6 shows a nucleotide sequence (SEQ ID NO:6) of a TAT311 cDNA, wherein SEQ ID NO:6 is a clone designated herein as “DNA150576”.

[0409] FIG. 7 shows a nucleotide sequence (SEQ ID NO:7) of a TAT312 cDNA, wherein SEQ ID NO:7 is a clone designated herein as “DNA150655”.

[0410] FIG. 8 shows a nucleotide sequence (SEQ ID NO:8) of a TAT313 cDNA, wherein SEQ ID NO:8 is a clone designated herein as “DNA151242”.

[0411] FIG. 9 shows a nucleotide sequence (SEQ ID NO:9) of a TAT314 cDNA, wherein SEQ ID NO:9 is a clone designated herein as “DNA151475”.

[0412] FIG. 10 shows a nucleotide sequence (SEQ ID NO: 10) of a TAT315 cDNA, wherein SEQ ID NO: 10 is a clone designated herein as “DNA170028”.

[0413] FIG. 11 shows a nucleotide sequence (SEQ ID NO: 11) of a TAT316 cDNA, wherein SEQ ID NO: 11 is a clone designated herein as “DNA170036”.

[0414] FIG. 12 shows a nucleotide sequence (SEQ ID NO: 12) of a TAT317 cDNA, wherein SEQ ID NO: 12 is a clone designated herein as “DNA226549”.

[0415] FIG. 13 shows a nucleotide sequence (SEQ ID NO: 13) of a TAT318 cDNA, wherein SEQ ID NO: 13 is a clone designated herein as “DNA193850”.

[0416] FIG. 14 shows a nucleotide sequence (SEQ ID NO: 14) of a TAT319 cDNA, wherein SEQ ID NO: 14 is a clone designated herein as “DNA194607”.

[0417] FIG. 15 shows a nucleotide sequence (SEQ ID NO: 15) of a TAT320 cDNA, wherein SEQ ID NO: 15 is a clone designated herein as “DNA196615”.

[0418] FIG. 16 shows a nucleotide sequence (SEQ ID NO: 16) of a TAT321 cDNA, wherein SEQ ID NO: 16 is a clone designated herein as “DNA 199062”.

[0419] FIGS. 17A-B show a nucleotide sequence (SEQ ID NO: 17) of a TAT322 cDNA, wherein SEQ ID NO:17 is a clone designated herein as “DNA220776”.

[0420] FIG. 18 shows a nucleotide sequence (SEQ ID NO: 18) of a TAT323 cDNA, wherein SEQ ID NO: 18 is a clone designated herein as “DNA254783”.

[0421] FIG. 19 shows a nucleotide sequence (SEQ ID NO: 19) of a TAT324 cDNA, wherein SEQ ID NO: 19 is a clone designated herein as “DNA220980”.

[0422] FIG. 20 shows a nucleotide sequence (SEQ ID NO:20) of a TAT325 cDNA, wherein SEQ ID NO:20 is a clone designated herein as “DNA254898”.

[0423] FIG. 21 shows a nucleotide sequence (SEQ ID NO:21) of a TAT326 cDNA, wherein SEQ ID NO:21 is a clone designated herein as “DNA256257”.

[0424] FIG. 22 shows a nucleotide sequence (SEQ ID NO:22) of a TAT327 cDNA, wherein SEQ ID NO:22 is a clone designated herein as “DNA222801”.

[0425] FIG. 23 shows a nucleotide sequence (SEQ ID NO:23) of a TAT328 cDNA, wherein SEQ ID NO:23 is a clone designated herein as “DNA225388”.

[0426] FIG. 24 shows a nucleotide sequence (SEQ ID NO:24) of a TAT329 cDNA, wherein SEQ ID NO:24 is a clone designated herein as “DNA226421”.

[0427] FIG. 25 shows a nucleotide sequence (SEQ ID NO:25) of a TAT330 cDNA, wherein SEQ ID NO:25 is a clone designated herein as “DNA228521”.

[0428] FIG. 26 shows a nucleotide sequence (SEQ ID NO:26) of a TAT331 cDNA, wherein SEQ ID NO:26 is a clone designated herein as “DNA233286”.

[0429] FIG. 27 shows a nucleotide sequence (SEQ ID NO:27) of a TAT332 cDNA, wherein SEQ ID NO:27 is a clone designated herein as “DNA45493”.

[0430] FIG. 28 shows a nucleotide sequence (SEQ ID NO:28) of a TAT333 cDNA, wherein SEQ ID NO:28 is a clone designated herein as “DNA59608”.

[0431] FIG. 29 shows a nucleotide sequence (SEQ ID NO:29) of a TAT334 cDNA, wherein SEQ ID NO:29 is a clone designated herein as “DNA62872”.

[0432] FIG. 30 shows a nucleotide sequence (SEQ ID NO:30) of a TAT335 cDNA, wherein SEQ ID NO:30 is a clone designated herein as “DNA76533”.

[0433] FIG. 31 shows a nucleotide sequence (SEQ ID NO:31) of a TAT336 cDNA, wherein SEQ ID NO:31 is a clone designated herein as “DNA84932”.

[0434] FIG. 32 shows a nucleotide sequence (SEQ ID NO:32) of a TAT337 cDNA, wherein SEQ ID NO:32 is a clone designated herein as “DNA88045”

[0435] FIG. 33 shows a nucleotide sequence (SEQ ID NO:33) of a TAT338 cDNA, wherein SEQ ID NO:33 is a clone designated herein as “DNA88232”.

[0436] FIG. 34 shows a nucleotide sequence (SEQ ID NO:34) of a TAT339 cDNA, wherein SEQ ID NO:34 is a clone designated herein as “DNA88237”.

[0437] FIG. 35 shows a nucleotide sequence (SEQ ID NO:35) of a TAT340 cDNA, wherein SEQ ID NO:35 is a clone designated herein as “DNA88334”.

[0438] FIG. 36 shows a nucleotide sequence (SEQ ID NO:36) of a TAT341 cDNA, wherein SEQ ID NO:36 is a clone designated herein as “DNA88411”.

[0439] FIG. 37 shows a nucleotide sequence (SEQ ID NO:37) of a TAT342 cDNA, wherein SEQ ID NO:37 is a clone designated herein as “DNA88431”.

[0440] FIG. 38 shows a nucleotide sequence (SEQ ID NO:38) of a TAT343 cDNA, wherein SEQ ID NO:38 is a clone designated herein as “DNA261046”.

[0441] FIG. 39 shows a nucleotide sequence (SEQ ID NO:39) of a TAT344 cDNA, wherein SEQ ID NO:39 is a clone designated herein as “DNA182432”.

[0442] FIG. 40 shows a nucleotide sequence (SEQ ID NO:40) of a TAT345 cDNA, wherein SEQ ID NO:40 is a clone designated herein as “DNA194036”.

[0443] FIG. 41 shows a nucleotide sequence (SEQ ID NO:41) of a TAT346 cDNA, wherein SEQ ID NO:41 is a clone designated herein as “DNA22573 1”.

[0444] FIG. 42 shows a nucleotide sequence (SEQ ID NO:42) of a TAT348 cDNA, wherein SEQ ID NO:42 is a clone designated herein as “DNA227996”.

[0445] FIG. 43 shows a nucleotide sequence (SEQ ID NO:43) of a TAT353 cDNA, wherein SEQ ID NO:43 is a clone designated herein as “DNA304652”.

[0446] FIGS. 44A-C show a nucleotide sequence (SEQ ID NO:44) of a TAT354 cDNA, wherein SEQ ID NO:44 is a clone designated herein as “DNA304766”.

[0447] FIG. 45 shows a nucleotide sequence (SEQ ID NO:45) of a TAT355 cDNA, wherein SEQ ID NO:45 is a clone designated herein as “DNA304767”.

[0448] FIG. 46 shows a nucleotide sequence (SEQ ID NO:46) of a TAT356 cDNA, wherein SEQ ID NO:46 is a clone designated herein as “DNA136821”.

[0449] FIG. 47 shows a nucleotide sequence (SEQ ID NO:47) of a TAT357 cDNA, wherein SEQ ID NO:47 is a clone designated herein as “DNA254851”.

[0450] FIG. 48 shows a nucleotide sequence (SEQ ID NO:48) of a TAT358 cDNA, wherein SEQ ID NO:48 is a clone designated herein as “DNA47361”.

[0451] FIGS. 49A-B show a nucleotide sequence (SEQ ID NO:49) of a TAT359 cDNA, wherein SEQ ID NO:49 is a clone designated herein as “DNA304987”.

[0452] FIG. 50 shows a nucleotide sequence (SEQ ID NO:50) of a TAT360 cDNA, wherein SEQ ID NO:50 is a clone designated herein as “DNA39975”.

[0453] FIG. 51 shows a nucleotide sequence (SEQ ID NO:51) of a TAT361 cDNA, wherein SEQ ID NO:51 is a clone designated herein as “DNA39979”.

[0454] FIG. 52 shows a nucleotide sequence (SEQ ID NO:52) of a TAT362 cDNA, wherein SEQ ID NO:52 is a clone designated herein as “DNA40594”.

[0455] FIG. 53 shows a nucleotide sequence (SEQ ID NO:53) of a TAT363 cDNA, wherein SEQ ID NO:53 is a clone designated herein as “DNA336539”.

[0456] FIG. 54 shows a nucleotide sequence (SEQ ID NO:54) of a TAT364 cDNA, wherein SEQ ID NO:54 is a clone designated herein as “DNA225930”.

[0457] FIGS. 55A-B show a nucleotide sequence (SEQ ID NO:55) of a TAT365 cDNA, wherein SEQ ID NO:55 is a clone designated herein as “DNA194909”.

[0458] FIG. 56 shows a nucleotide sequence (SEQ ID NO:56) of a TAT366 cDNA, wherein SEQ ID NO:56 is a clone designated herein as “DNA271250”.

[0459] FIG. 57 shows a nucleotide sequence (SEQ ID NO:57) of a TAT362 cDNA, wherein SEQ ID NO:57 is a clone designated herein as “DNA210128”.

[0460] FIG. 58 shows a nucleotide sequence (SEQ ID NO:58) of a TAT368 cDNA, wherein SEQ ID NO:58 is a clone designated herein as “DNA257955”.

[0461] FIG. 59 shows a nucleotide sequence (SEQ ID NO:59) of a TAT369 cDNA, wherein SEQ ID NO:59 is a clone designated herein as “DNA266520”.

[0462] FIG. 60 shows a nucleotide sequence (SEQ ID NO:60) of a TAT370 cDNA, wherein SEQ ID NO:60 is a clone designated herein as “DNA327261”.

[0463] FIG. 61 shows a nucleotide sequence (SEQ ID NO:61) of a TAT371 cDNA, wherein SEQ ID NO:61 is a clone designated herein as “DNA327295”.

[0464] FIG. 62 shows a nucleotide sequence (SEQ ID NO:62) of a TAT372 cDNA, wherein SEQ ID NO:62 is a clone designated herein as “DNA225786”.

[0465] FIG. 63 shows a nucleotide sequence (SEQ ID NO:63) of a TAT380 cDNA, wherein SEQ ID NO:63 is a clone designated herein as “DNA226374”.

[0466] FIG. 64 shows a nucleotide sequence (SEQ ID NO:64) of a TAT381 cDNA, wherein SEQ ID NO:64 is a clone designated herein as “DNA255788”.

[0467] FIG. 65 shows a nucleotide sequence (SEQ ID NO:65) of a TAT382 cDNA, wherein SEQ ID NO:65 is a clone designated herein as “DNA327296”.

[0468] FIG. 66 shows a nucleotide sequence (SEQ ID NO:66) of a TAT383 cDNA, wherein SEQ ID NO:66 is a clone designated herein as “DNA96970”.

[0469] FIG. 67 shows a nucleotide sequence (SEQ ID NO:67) of a TAT384 cDNA, wherein SEQ ID NO:67 is a clone designated herein as “DNA225790”.

[0470] FIG. 68 shows a nucleotide sequence (SEQ ID NO:68) of a TAT385 cDNA, wherein SEQ ID NO:68 is a clone designated herein as “DNA92958”.

[0471] FIG. 69 shows a nucleotide sequence (SEQ ID NO:69) of a TAT386 cDNA, wherein SEQ ID NO:69 is a clone designated herein as “DNA257716”.

[0472] FIG. 70 shows a nucleotide sequence (SEQ ID NO:70) of a TAT387 cDNA, wherein SEQ ID NO:70 is a clone designated herein as “DNA226862”.

[0473] FIGS. 71A-B show a nucleotide sequence (SEQ ID NO:71) of a TAT388 cDNA, wherein SEQ ID NO:71 is a clone designated herein as “DNA331165”.

[0474] FIGS. 72A-B show a nucleotide sequence (SEQ ID NO:72) of a TAT389 cDNA, wherein SEQ ID NO:72 is a clone designated herein as “DNA331167”.

[0475] FIG. 73 shows a nucleotide sequence (SEQ ID NO:73) of a TAT390 cDNA, wherein SEQ ID NO:73 is a clone designated herein as “DNA331173”.

[0476] FIGS. 74A-B show a nucleotide sequence (SEQ ID NO:74) of a TAT391 cDNA, wherein SEQ ID NO:74 is a clone designated herein as “DNA331171”.

[0477] FIGS. 75A-B show a nucleotide sequence (SEQ ID NO:75) of a TAT392 cDNA, wherein SEQ ID NO:75 is a clone designated herein as “DNA226266”.

[0478] FIG. 76 shows a nucleotide sequence (SEQ ID NO:76) of a TAT396 cDNA, wherein SEQ ID NO:76 is a clone designated herein as “DNA125753”.

[0479] FIG. 77 shows a nucleotide sequence (SEQ ID NO:77) of a TAT397 cDNA, wherein SEQ ID NO:77 is a clone designated herein as “DNA199793”.

[0480] FIGS. 78A-B show a nucleotide sequence (SEQ ID NO:78) of a TAT398 cDNA, wherein SEQ ID NO:78 is a clone designated herein as “DNA210647”.

[0481] FIGS. 79A-B show a nucleotide sequence (SEQ ID NO:79) of a TAT427 cDNA, wherein SEQ ID NO:79 is a clone designated herein as “DNA332801”.

[0482] FIG. 80 shows a nucleotide sequence (SEQ ID NO:80) of a TAT399 cDNA, wherein SEQ ID NO:80 is a clone designated herein as “DNA226884”.

[0483] FIG. 81 shows a nucleotide sequence (SEQ ID NO:81) of a TAT423 cDNA, wherein SEQ ID NO:81 is a clone designated herein as “DNA335916”.

[0484] FIG. 82 shows the amino acid sequence (SEQ ID NO:82) derived from the coding sequence of SEQ ID NO:1 shown in FIG. 1.

[0485] FIG. 83 shows the amino acid sequence (SEQ ID NO:83) derived from the coding sequence of SEQ ID NO:3 shown in FIG. 3.

[0486] FIG. 84 shows the amino acid sequence (SEQ ID NO:84) derived from the coding sequence of SEQ ID NO:4 shown in FIG. 4.

[0487] FIG. 85 shows the amino acid sequence (SEQ ID NO:85) derived from the coding sequence of SEQ ID NO:5 shown in FIG. 5.

[0488] FIG. 86 shows the amino acid sequence (SEQ ID NO:86) derived from the coding sequence of SEQ ID NO:6 shown in FIG. 6.

[0489] FIG. 87 shows the amino acid sequence (SEQ ID NO:87) derived from the coding sequence of SEQ ID NO:7 shown in FIG. 7.

[0490] FIG. 88 shows the amino acid sequence (SEQ ID NO:88) derived from the coding sequence of SEQ ID NO:8 shown in FIG. 8.

[0491] FIG. 89 shows the amino acid sequence (SEQ ID NO:89) derived from the coding sequence of SEQ ID NO:9 shown in FIG. 9.

[0492] FIG. 90 shows the amino acid sequence (SEQ ID NO:90) derived from the coding sequence of SEQ ID NO:10 shown in FIG. 10.

[0493] FIG. 91 shows the amino acid sequence (SEQ ID NO:91) derived from the coding sequence of SEQ ID NO: 11 shown in FIG. 11.

[0494] FIG. 92 shows the amino acid sequence (SEQ ID NO:92) derived from the coding sequence of SEQ ID NO: 12 shown in FIG. 12.

[0495] FIG. 93 shows the amino acid sequence (SEQ ID NO:93) derived from the coding sequence of SEQ ID NO: 13 shown in FIG. 13.

[0496] FIG. 94 shows the amino acid sequence (SEQ ID NO:94) derived from the coding sequence of SEQ ID NO:14 shown in FIG. 14.

[0497] FIG. 95 shows the amino acid sequence (SEQ ID NO:95) derived from the coding sequence of SEQ ID NO:15 shown in FIG. 15.

[0498] FIG. 96 shows the amino acid sequence (SEQ ID NO:96) derived from the coding sequence of SEQ ID NO:16 shown in FIG. 16.

[0499] FIG. 97 shows the amino acid sequence (SEQ ID NO:97) derived from the coding sequence of SEQ ID NO:17 shown in FIGS. 17A-B.

[0500] FIG. 98 shows the amino acid sequence (SEQ ID NO:98) derived from the coding sequence of SEQ ID NO:18 shown in FIG. 18.

[0501] FIG. 99 shows the amino acid sequence (SEQ ID NO:99) derived from the coding sequence of SEQ ID NO:19 shown in FIG. 19.

[0502] FIG. 100 shows the amino acid sequence (SEQ ID NO: 100) derived from the coding sequence of SEQ ID NO:20 shown in FIG. 20.

[0503] FIG. 101 shows the amino acid sequence (SEQ ID NO: 101) derived from the coding sequence of SEQ ID NO:21 shown in FIG. 21.

[0504] FIG. 102 shows the amino acid sequence (SEQ ID NO: 102) derived from the coding sequence of SEQ ID NO:22 shown in FIG. 22.

[0505] FIG. 103 shows the amino acid sequence (SEQ ID NO: 103) derived from the coding sequence of SEQ ID NO:23 shown in FIG. 23.

[0506] FIG. 104 shows the amino acid sequence (SEQ ID NO: 104) derived from the coding sequence of SEQ ID NO:24 shown in FIG. 24.

[0507] FIG. 105 shows the amino acid sequence (SEQ ID NO: 105) derived from the coding sequence of SEQ ID NO:25 shown in FIG. 25.

[0508] FIG. 106 shows the amino acid sequence (SEQ ID NO: 106) derived from the coding sequence of SEQ ID NO:26 shown in FIG. 26.

[0509] FIG. 107 shows the amino acid sequence (SEQ ID NO: 107) derived from the coding sequence of SEQ ID NO:27 shown in FIG. 27.

[0510] FIG. 108 shows the amino acid sequence (SEQ ID NO: 108) derived from the coding sequence of SEQ ID NO:28 shown in FIG. 28.

[0511] FIG. 109 shows the amino acid sequence (SEQ ID NO: 109) derived from the coding sequence of SEQ ID NO:29 shown in FIG. 29.

[0512] FIG. 110 shows the amino acid sequence (SEQ ID NO: 110) derived from the coding sequence of SEQ ID NO:30 shown in FIG. 30.

[0513] FIG. 111 shows the amino acid sequence (SEQ ID NO: 111) derived from the coding sequence of SEQ ID NO:31 shown in FIG. 31.

[0514] FIG. 112 shows the amino acid sequence (SEQ ID NO: 112) derived from the coding sequence of SEQ ID NO:32 shown in FIG. 32.

[0515] FIG. 113 shows the amino acid sequence (SEQ ID NO: 113) derived from the coding sequence of SEQ ID NO:33 shown in FIG. 33.

[0516] FIG. 114 shows the amino acid sequence (SEQ ID NO: 114) derived from the coding sequence of SEQ ID NO:34 shown in FIG. 34.

[0517] FIG. 115 shows the amino acid sequence (SEQ ID NO: 115) derived from the coding sequence of SEQ ID NO:35 shown in FIG. 35.

[0518] FIG. 116 shows the amino acid sequence (SEQ ID NO: 116) derived from the coding sequence of SEQ ID NO:36 shown in FIG. 36.

[0519] FIG. 117 shows the amino acid sequence (SEQ ID NO: 117) derived from the coding sequence of SEQ ID NO:37 shown in FIG. 37.

[0520] FIG. 118 shows the amino acid sequence (SEQ ID NO: 118) derived from the coding sequence of SEQ ID NO:38 shown in FIG. 38.

[0521] FIG. 119 shows the amino acid sequence (SEQ ID NO: 119) derived from the coding sequence of SEQ ID NO:39 shown in FIG. 39.

[0522] FIG. 120 shows the amino acid sequence (SEQ ID NO: 120) derived from the coding sequence of SEQ ID NO:40 shown in FIG. 40.

[0523] FIG. 121 shows the amino acid sequence (SEQ ID NO: 121) derived from the coding sequence of SEQ ID NO:41 shown in FIG. 41.

[0524] FIG. 122 shows the amino acid sequence (SEQ ID NO: 122) derived from the coding sequence of SEQ ID NO:42 shown in FIG. 42.

[0525] FIG. 123 shows the amino acid sequence (SEQ ID NO: 123) derived from the coding sequence of SEQ ID NO:43 shown in FIG. 43.

[0526] FIG. 124 shows the amino acid sequence (SEQ ID NO: 124) derived from the coding sequence of SEQ ID NO:44 shown in FIGS. 44A-C.

[0527] FIG. 125 shows the amino acid sequence (SEQ ID NO: 125) derived from the coding sequence of SEQ ID NO:45 shown in FIG. 45.

[0528] FIG. 126 shows the amino acid sequence (SEQ ID NO: 126) derived from the coding sequence of SEQ ID NO:46 shown in FIG. 46.

[0529] FIG. 127 shows the amino acid sequence (SEQ ID NO: 127) derived from the coding sequence of SEQ ID NO:47 shown in FIG. 47.

[0530] FIG. 128 shows the amino acid sequence (SEQ ID NO: 128) derived from the coding sequence of SEQ ID NO:49 shown in FIGS. 49A-B.

[0531] FIG. 129 shows the amino acid sequence (SEQ ID NO: 129) derived from the coding sequence of SEQ ID NO:50 shown in FIG. 50.

[0532] FIG. 130 shows the amino acid sequence (SEQ ID NO: 130) derived from the coding sequence of SEQ ID NO:51 shown in FIG. 51.

[0533] FIG. 131 shows the amino acid sequence (SEQ ID NO: 131) derived from the coding sequence of SEQ ID NO:52 shown in FIG. 52.

[0534] FIG. 132 shows the amino acid sequence (SEQ ID NO: 132) derived from the coding sequence of SEQ ID NO:53 shown in FIG. 53.

[0535] FIG. 133 shows the amino acid sequence (SEQ ID NO: 133) derived from the coding sequence of SEQ ID NO:54 shown in FIG. 54.

[0536] FIGS. 134A-B show the amino acid sequence (SEQ ID NO: 134) derived from the coding sequence of SEQ ID NO:55 shown in FIGS. 55A-B.

[0537] FIG. 135 shows the amino acid sequence (SEQ ID NO: 135) derived from the coding sequence of SEQ ID NO:56 shown in FIG. 56.

[0538] FIG. 136 shows the amino acid sequence (SEQ ID NO: 136) derived from the coding sequence of SEQ ID NO:57 shown in FIG. 57.

[0539] FIG. 137 shows the amino acid sequence (SEQ ID NO: 137) derived from the coding sequence of SEQ ID NO:58 shown in FIG. 58.

[0540] FIG. 138 shows the amino acid sequence (SEQ ID NO: 138) derived from the coding sequence of SEQ ID NO:59 shown in FIG. 59.

[0541] FIG. 139 shows the amino acid sequence (SEQ ID NO: 139) derived from the coding sequence of SEQ ID NO:60 shown in FIG. 60.

[0542] FIG. 140 shows the amino acid sequence (SEQ ID NO: 140) derived from the coding sequence of SEQ ID NO:62 shown in FIG. 62.

[0543] FIG. 141 shows the amino acid sequence (SEQ ID NO: 141) derived from the coding sequence of SEQ ID NO:63 shown in FIG. 63.

[0544] FIG. 142 shows the amino acid sequence (SEQ ID NO: 142) derived from the coding sequence of SEQ ID NO:64 shown in FIG. 647.

[0545] FIG. 143 shows the amino acid sequence (SEQ ID NO: 143) derived from the coding sequence of SEQ ID NO:65 shown in FIG. 65.

[0546] FIG. 144 shows the amino acid sequence (SEQ ID NO: 144) derived from the coding sequence of SEQ ID NO:66 shown in FIG. 66.

[0547] FIG. 145 shows the amino acid sequence (SEQ ID NO: 145) derived from the coding sequence of SEQ ID NO:67 shown in FIG. 67.

[0548] FIG. 146 shows the amino acid sequence (SEQ ID NO: 146) derived from the coding sequence of SEQ ID NO:69 shown in FIG. 69.

[0549] FIG. 147 shows the amino acid sequence (SEQ ID NO: 147) derived from the coding sequence of SEQ ID NO:70 shown in FIG. 70.

[0550] FIG. 148 shows the amino acid sequence (SEQ ID NO: 148) derived from the coding sequence of SEQ ID NO:71 shown in FIGS. 71A-B.

[0551] FIG. 149 shows the amino acid sequence (SEQ ID NO: 149) derived from the coding sequence of SEQ ID NO:72 shown in FIGS. 72A-B.

[0552] FIG. 150 shows the amino acid sequence (SEQ ID NO: 150) derived from the coding sequence of SEQ ID NO:73 shown in FIG. 73.

[0553] FIG. 151 shows the amino acid sequence (SEQ ID NO: 151) derived from the coding sequence of SEQ ID NO:74 shown in FIGS. 74A-B.

[0554] FIG. 152 shows the amino acid sequence (SEQ ID NO: 152) derived from the coding sequence of SEQ ID NO:75 shown in FIGS. 75A-B.

[0555] FIG. 153 shows the amino acid sequence (SEQ ID NO: 153) derived from the coding sequence of SEQ ID NO:76 shown in FIG. 76.

[0556] FIG. 154 shows the amino acid sequence (SEQ ID NO: 154) derived from the coding sequence of SEQ ID NO:77 shown in FIG. 77.

[0557] FIG. 155 shows the amino acid sequence (SEQ ID NO: 155) derived from the coding sequence of SEQ ID NO:78 shown in FIGS. 78A-B.

[0558] FIG. 156 shows the amino acid sequence (SEQ ID NO: 156) derived from the coding sequence of SEQ ID NO:79 shown in FIGS. 79A-B.

[0559] FIG. 157 shows the amino acid sequence (SEQ ID NO: 157) derived from the coding sequence of SEQ ID NO:80 shown in FIG. 80.

[0560] FIG. 158 shows the amino acid sequence (SEQ ID NO: 158) derived from the coding sequence of SEQ ID NO:81 shown in FIG. 81.

### DETAILED DESCRIPTION OF THE PREFERRED EMBODIMENTS

[0561] I. Definitions

[0562] The terms “TAT polypeptide” and “TAT” as used herein and when immediately followed by a numerical designation, refer to various polypeptides, wherein the complete designation (i.e., TAT/number) refers to specific polypeptide sequences as described herein. The terms “TAT/number polypeptide” and “TAT/number” wherein the term “number” is provided as an actual numerical designation as used herein encompass native sequence polypeptides, polypeptide variants and fragments of native sequence polypeptides and polypeptide variants (which are further defined herein). The TAT polypeptides described herein may be isolated from a variety of sources, such as from human tissue types or from another source, or prepared by recombinant or synthetic methods. The term “TAT polypeptide” refers to each individual TAT/number polypeptide disclosed herein. All disclosures in this specification which refer to the “TAT polypeptide” refer to each of the polypeptides individually as well as jointly. For example, descriptions of the preparation of, purification of, derivation of, formation of antibodies to or against, formation of TAT binding oligopeptides to or against, formation of TAT binding organic molecules to or against, administration of, compositions containing, treatment of a disease with, etc., pertain to each polypeptide of the invention individually. The term “TAT polypeptide” also includes variants of the TAT/number polypeptides disclosed herein.

[0563] A “native sequence TAT polypeptide” comprises a polypeptide having the same amino acid sequence as the corresponding TAT polypeptide derived from nature. Such native sequence TAT polypeptides can be isolated from nature or can be produced by recombinant or synthetic means. The term “native sequence TAT polypeptide” specifically encompasses naturally-occurring truncated or secreted forms of the specific TAT polypeptide (e.g., an extracellular domain sequence), naturally-occurring variant forms (e.g., alternatively spliced forms) and naturally-occurring allelic variants of the polypeptide. In certain embodiments of the invention, the native sequence TAT polypeptides disclosed herein are mature or full-length native sequence polypeptides comprising the full-length amino acids sequences shown in the accompanying figures. Start and stop codons (if indicated) are shown in bold font and underlined in the figures. Nucleic acid residues indicated as “N” or “X” in the accompanying figures are any nucleic acid residue. However, while the TAT polypeptides disclosed in the accompanying figures are shown to begin with methionine residues designated herein as amino acid position 1 in the figures, it is conceivable and possible that other methionine residues located either upstream or downstream from the amino acid position 1 in the figures may be employed as the starting amino acid residue for the TAT polypeptides.

[0564] The TAT polypeptide “extracellular domain” or “ECD” refers to a form of the TAT polypeptide which is essentially free of the transmembrane and cytoplasmic domains. Ordinarily, a TAT polypeptide ECD will have less than 1% of such transmembrane and/or cytoplasmic domains and preferably, will have less than 0.5% of such domains. It will be understood that any transmembrane domains identified for the TAT polypeptides of the present invention are identified pursuant to criteria routinely employed in the art for identifying that type of hydrophobic domain. The exact boundaries of a transmembrane domain may vary but most likely by no more than about 5 amino acids at either end of the domain as initially identified herein. Optionally, therefore, an extracellular domain of a TAT polypeptide may contain from about 5 or fewer amino acids on either side of the transmembrane domain/extracellular domain boundary as identified in the Examples or specification and such polypeptides, with or without the associated signal peptide, and nucleic acid encoding them, are contemplated by the present invention.

[0565] The approximate location of the “signal peptides” of the various TAT polypeptides disclosed herein may be shown in the present specification and/or the accompanying figures. It is noted, however, that the C-terminal boundary of a signal peptide may vary, but most likely by no more than about 5 amino acids on either side of the signal peptide C-terminal boundary as initially identified herein, wherein the C-terminal boundary of the signal peptide may be identified pursuant to criteria routinely employed in the art for identifying that type of amino acid sequence element (e.g., Nielsen et al., Prot. Eng. 10: 1-6 (1997) and von Heinje et al., Nucl. Acids. Res. 14:4683-4690 (1986)). Moreover, it is also recognized that, in some cases, cleavage of a signal sequence from a secreted polypeptide is not entirely uniform, resulting in more than one secreted species. These mature polypeptides, where the signal peptide is cleaved within no more than about 5 amino acids on either side of the C-terminal boundary of the signal peptide as identified herein, and the polynucleotides encoding them, are contemplated by the present invention.

[0566] “TAT polypeptide variant” means a TAT polypeptide, preferably an active TAT polypeptide, as defined herein having at least about 80% amino acid sequence identity with a full-length native sequence TAT polypeptide sequence as disclosed herein, a TAT polypeptide sequence lacking the signal peptide as disclosed herein, an extracellular domain of a TAT polypeptide, with or without the signal peptide, as disclosed herein or any other fragment of a full-length TAT polypeptide sequence as disclosed herein (such as those encoded by a nucleic acid that represents only a portion of the complete coding sequence for a full-length TAT polypeptide). Such TAT polypeptide variants include, for instance, TAT polypeptides wherein one or more amino acid residues are added, or deleted, at the N- or C-terminus of the full-length native amino acid sequence. Ordinarily, a TAT polypeptide variant will have at least about 80% amino acid sequence identity, alternatively at least about 81%, 82%, 83%, 84%, 85%, 86%, 87%, 88%, 89%, 90%, 91%, 92%, 93%, 94%, 95%, 96%, 97%, 98%, or 99% amino acid sequence identity, to a full-length native sequence TAT polypeptide sequence as disclosed herein, a TAT polypeptide sequence lacking the signal peptide as disclosed herein, an extracellular domain of a TAT polypeptide, with or without the signal peptide, as disclosed herein or any other specifically defined fragment of a full-length TAT polypeptide sequence as disclosed herein. Ordinarily, TAT variant polypeptides are at least about 10 amino acids in length, alternatively at least about 20, 30, 40, 50, 60, 70, 80, 90, 100, 110, 120, 130, 140, 150, 160, 170, 180, 190, 200, 210, 220, 230, 240, 250, 260, 270, 280, 290, 300, 310, 320, 330, 340, 350, 360, 370, 380, 390, 400, 410, 420, 430, 440, 450, 460, 470, 480, 490, 500, 510, 520, 530, 540, 550, 560, 570, 580, 590, 600 amino acids in length, or more. Optionally, TAT variant polypeptides will have no more than one conservative amino acid substitution as compared to the native TAT polypeptide sequence, alternatively no more than 2, 3, 4, 5, 6, 7, 8, 9, or 10 conservative amino acid substitution as compared to the native TAT polypeptide sequence.

[0567] “Percent (%) amino acid sequence identity” with respect to the TAT polypeptide sequences identified herein is defined as the percentage of amino acid residues in a candidate sequence that are identical with the amino acid residues in the specific TAT polypeptide sequence, after aligning the sequences and introducing gaps, if necessary, to achieve the maximum percent sequence identity, and not considering any conservative substitutions as part of the sequence identity. Alignment for purposes of determining percent amino acid sequence identity can be achieved in various ways that are within the skill in the art, for instance, using publicly available computer software such as BLAST, BLAST-2, ALIGN or Megalign (DNASTAR) software. Those skilled in the art can determine appropriate parameters for measuring alignment, including any algorithms needed to achieve maximal alignment over the full length of the sequences being compared. For purposes herein, however, % amino acid sequence identity values are generated using the sequence comparison computer program ALIGN-2, wherein the complete source code for the ALIGN-2 program is provided in Table 1 below. The ALIGN-2 sequence comparison computer program was authored by Genentech, Inc. and the source code shown in Table 1 below has been filed with user documentation in the U.S. Copyright Office, Washington D.C., 20559, where it is registered under U.S. Copyright Registration No. TXU510087. The ALIGN-2 program is publicly available through Genentech, Inc., South San Francisco, Calif. or may be compiled from the source code provided in Table 1 below. The ALIGN-2 program should be compiled for use on a UNIX operating system, preferably digital UNIX V4.0D. All sequence comparison parameters are set by the ALIGN-2 program and do not vary.

[0568] In situations where ALIGN-2 is employed for amino acid sequence comparisons, the % amino acid sequence identity of a given amino acid sequence A to, with, or against a given amino acid sequence B (which can alternatively be phrased as a given amino acid sequence A that has or comprises a certain % amino acid sequence identity to, with, or against a given amino acid sequence B) is calculated as follows:

100 times the fraction X/Y

[0569] where X is the number of amino acid residues scored as identical matches by the sequence alignment program ALIGN-2 in that program's alignment of A and B, and where Y is the total number of amino acid residues in B. It will be appreciated that where the length of amino acid sequence A is not equal to the length of amino acid sequence B, the % amino acid sequence identity of A to B will not equal the % amino acid sequence identity of B to A. As examples of % amino acid sequence identity calculations using this method, Tables 2 and 3 demonstrate how to calculate the % amino acid sequence identity of the amino acid sequence designated “Comparison Protein” to the amino acid sequence designated “TAT”, wherein “TAT” represents the amino acid sequence of a hypothetical TAT polypeptide of interest, “Comparison Protein” represents the amino acid sequence of a polypeptide against which the “TAT” polypeptide of interest is being compared, and “X, “Y” and “Z” each represent different hypothetical amino acid residues. Unless specifically stated otherwise, all % amino acid sequence identity values used herein are obtained as described in the immediately preceding paragraph using the ALIGN-2 computer program.

[0570] “TAT variant polynucleotide” or “TAT variant nucleic acid sequence” means a nucleic acid molecule which encodes a TAT polypeptide, preferably an active TAT polypeptide, as defined herein and which has at least about 80% nucleic acid sequence identity with a nucleotide acid sequence encoding a full-length native sequence TAT polypeptide sequence as disclosed herein, a full-length native sequence TAT polypeptide sequence lacking the signal peptide as disclosed herein, an extracellular domain of a TAT polypeptide, with or without the signal peptide, as disclosed herein or any other fragment of a full-length TAT polypeptide sequence as disclosed herein (such as those encoded by a nucleic acid that represents only a portion of the complete coding sequence for a full-length TAT polypeptide). Ordinarily, a TAT variant polynucleotide will have at least about 80% nucleic acid sequence identity, alternatively at least about 81%, 82%, 83%, 84%, 85%, 86%, 87%, 88%, 89%, 90%, 91%, 92%, 93%, 94%, 95%, 96%, 97%, 98%, or 99% nucleic acid sequence identity with a nucleic acid sequence encoding a full-length native sequence TAT polypeptide sequence as disclosed herein, a full-length native sequence TAT polypeptide sequence lacking the signal peptide as disclosed herein, an extracellular domain of a TAT polypeptide, with or without the signal sequence, as disclosed herein or any other fragment of a full-length TAT polypeptide sequence as disclosed herein. Variants do not encompass the native nucleotide sequence.

[0571] Ordinarily, TAT variant polynucleotides are at least about 5 nucleotides in length, alternatively at least about 6, 7, 8, 9, 10, 11, 12, 13, 14, 15, 16, 17, 18, 19, 20, 21, 22, 23, 24, 25, 26, 27, 28, 29, 30, 35, 40, 45, 50, 55, 60, 65, 70, 75, 80, 85, 90, 95, 100, 105, 110, 115, 120, 125, 130, 135, 140, 145, 150, 155, 160, 165, 170, 175, 180, 185, 190, 195, 200, 210, 220, 230, 240, 250, 260, 270, 280, 290, 300, 310, 320, 330, 340, 350, 360, 370, 380, 390, 400, 410, 420, 430, 440, 450, 460, 470, 480, 490, 500, 510, 520, 530, 540, 550, 560, 570, 580, 590, 600, 610, 620, 630, 640, 650, 660, 670, 680, 690, 700, 710, 720, 730, 740, 750, 760, 770, 780, 790, 800, 810, 820, 830, 840, 850, 860, 870, 880, 890, 900, 910, 920, 930, 940, 950, 960, 970, 980, 990, or 1000 nucleotides in length, wherein in this context the term “about” means the referenced nucleotide sequence length plus or minus 10% of that referenced length.

[0572] “Percent (%) nucleic acid sequence identity” with respect to TAT-encoding nucleic acid sequences identified herein is defined as the percentage of nucleotides in a candidate sequence that are identical with the nucleotides in the TAT nucleic acid sequence of interest, after aligning the sequences and introducing gaps, if necessary, to achieve the maximum percent sequence identity. Alignment for purposes of determining percent nucleic acid sequence identity can be achieved in various ways that are within the skill in the art, for instance, using publicly available computer software such as BLAST, BLAST-2, ALIGN or Megalign (DNASTAR) software. For purposes herein, however, % nucleic acid sequence identity values are generated using the sequence comparison computer program ALIGN-2, wherein the complete source code for the ALIGN-2 program is provided in Table 1 below. The ALIGN-2 sequence comparison computer program was authored by Genentech, Inc. and the source code shown in Table 1 below has been filed with user documentation in the U.S. Copyright Office, Washington D.C., 20559, where it is registered under U.S. Copyright Registration No. TXU510087. The ALIGN-2 program is publicly available through Genentech, Inc., South San Francisco, Calif. or may be compiled from the source code provided in Table 1 below. The ALIGN-2 program should be compiled for use on a UNIX operating system, preferably digital UNIX V4.0D. All sequence comparison parameters are set by the ALIGN-2 program and do not vary.

[0573] In situations where ALIGN-2 is employed for nucleic acid sequence comparisons, the % nucleic acid sequence identity of a given nucleic acid sequence C to, with, or against a given nucleic acid sequence D (which can alternatively be phrased as a given nucleic acid sequence C that has or comprises a certain % nucleic acid sequence identity to, with, or against a given nucleic acid sequence D) is calculated as follows:

100 times the fraction W/Z

[0574] where W is the number of nucleotides scored as identical matches by the sequence alignment program ALIGN-2 in that program's alignment of C and D, and where Z is the total number of nucleotides in D. It will be appreciated that where the length of nucleic acid sequence C is not equal to the length of nucleic acid sequence D, the % nucleic acid sequence identity of C to D will not equal the % nucleic acid sequence identity of D to C. As examples of % nucleic acid sequence identity calculations, Tables 4 and 5, demonstrate how to calculate the % nucleic acid sequence identity of the nucleic acid sequence designated “Comparison DNA” to the nucleic acid sequence designated “TAT-DNA”, wherein “TAT-DNA” represents a hypothetical TAT-encoding nucleic acid sequence of interest, “Comparison DNA” represents the nucleotide sequence of a nucleic acid molecule against which the “TAT-DNA” nucleic acid molecule of interest is being compared, and “N”, “L” and “V” each represent different hypothetical nucleotides. Unless specifically stated otherwise, all % nucleic acid sequence identity values used herein are obtained as described in the immediately preceding paragraph using the ALIGN-2 computer program.

[0575] In other embodiments, TAT variant polynucleotides are nucleic acid molecules that encode a TAT polypeptide and which are capable of hybridizing, preferably under stringent hybridization and wash conditions, to nucleotide sequences encoding a full-length TAT polypeptide as disclosed herein. TAT variant polypeptides may be those that are encoded by a TAT variant polynucleotide.

[0576] The term “full-length coding region” when used in reference to a nucleic acid encoding a TAT polypeptide refers to the sequence of nucleotides which encode the full-length TAT polypeptide of the invention (which is often shown between start and stop codons, inclusive thereof, in the accompanying figures). The term “full-length coding region” when used in reference to an ATCC deposited nucleic acid refers to the TAT polypeptide-encoding portion of the cDNA that is inserted into the vector deposited with the ATCC (which is often shown between start and stop codons, inclusive thereof, in the accompanying figures).

[0577] “Isolated,” when used to describe the various TAT polypeptides disclosed herein, means polypeptide that has been identified and separated and/or recovered from a component of its natural environment. Contaminant components of its natural environment are materials that would typically interfere with diagnostic or therapeutic uses for the polypeptide, and may include enzymes, hormones, and other proteinaceous or non-proteinaceous solutes. In preferred embodiments, the polypeptide will be purified (1) to a degree sufficient to obtain at least 15 residues of N-terminal or internal amino acid sequence by use of a spinning cup sequenator, or (2) to homogeneity by SDS-PAGE under non-reducing or reducing conditions using Coomassie blue or, preferably, silver stain. Isolated polypeptide includes polypeptide in situ within recombinant cells, since at least one component of the TAT polypeptide natural environment will not be present. Ordinarily, however, isolated polypeptide will be prepared by at least one purification step.

[0578] An “isolated” TAT polypeptide-encoding nucleic acid or other polypeptide-encoding nucleic acid is a nucleic acid molecule that is identified and separated from at least one contaminant nucleic acid molecule with which it is ordinarily associated in the natural source of the polypeptide-encoding nucleic acid. An isolated polypeptide-encoding nucleic acid molecule is other than in the form or setting in which it is found in nature. Isolated polypeptide-encoding nucleic acid molecules therefore are distinguished from the specific polypeptide-encoding nucleic acid molecule as it exists in natural cells. However, an isolated polypeptide-encoding nucleic acid molecule includes polypeptide-encoding nucleic acid molecules contained in cells that ordinarily express the polypeptide where, for example, the nucleic acid molecule is in a chromosomal location different from that of natural cells.

[0579] The term “control sequences” refers to DNA sequences necessary for the expression of an operably linked coding sequence in a particular host organism. The control sequences that are suitable for prokaryotes, for example, include a promoter, optionally an operator sequence, and a ribosome binding site. Eukaryotic cells are known to utilize promoters, polyadenylation signals, and enhancers.

[0580] Nucleic acid is “operably linked” when it is placed into a functional relationship with another nucleic acid sequence. For example, DNA for a presequence or secretory leader is operably linked to DNA for a polypeptide if it is expressed as a preprotein that participates in the secretion of the polypeptide; a promoter or enhancer is operably linked to a coding sequence if it affects the transcription of the sequence; or a ribosome binding site is operably linked to a coding sequence if it is positioned so as to facilitate translation. Generally, “operably linked” means that the DNA sequences being linked are contiguous, and, in the case of a secretory leader, contiguous and in reading phase. However, enhancers do not have to be contiguous. Linking is accomplished by ligation at convenient restriction sites. If such sites do not exist, the synthetic oligonucleotide adaptors or linkers are used in accordance with conventional practice.

[0581] “Stringency” of hybridization reactions is readily determinable by one of ordinary skill in the art, and generally is an empirical calculation dependent upon probe length, washing temperature, and salt concentration. In general, longer probes require higher temperatures for proper annealing, while shorter probes need lower temperatures. Hybridization generally depends on the ability of denatured DNA to reanneal when complementary strands are present in an environment below their melting temperature. The higher the degree of desired homology between the probe and hybridizable sequence, the higher the relative temperature which can be used. As a result, it follows that higher relative temperatures would tend to make the reaction conditions more stringent, while lower temperatures less so. For additional details and explanation of stringency of hybridization reactions, see Ausubel et al., Current Protocols in Molecular Biology, Wiley Interscience Publishers, (1995).

[0582] “Stringent conditions” or “high stringency conditions”, as defined herein, may be identified by those that: (1) employ low ionic strength and high temperature for washing, for example 0.015 M sodium chloride/0.0015 M sodium citrate/0.1% sodium dodecyl sulfate at 50° C.; (2) employ during hybridization a denaturing agent, such as formamide, for example, 50% (v/v) formamide with 0.1% bovine serum albumin/0.1% Ficoll/0.1% polyvinylpyrrolidone/50 mM sodium phosphate buffer at pH 6.5 with 750 mM sodium chloride, 75 mM sodium citrate at 42° C.; or (3) overnight hybridization in a solution that employs 50% formamide, 5×SSC (0.75 M NaCl, 0.075 M sodium citrate), 50 mM sodium phosphate (pH 6.8), 0.1% sodium pyrophosphate, 5× Denhardt's solution, sonicated salmon sperm DNA (50 μg/ml), 0.1% SDS, and 10% dextran sulfate at 42° C., with a 10 minute wash at 42° C. in 0.2×SSC (sodium chloride/sodium citrate) followed by a 10 minute high-stringency wash consisting of 0.1×SSC containing EDTA at 55° C.

[0583] “Moderately stringent conditions” may be identified as described by Sambrook et al., Molecular Cloning: A Laboratory Manual, New York: Cold Spring Harbor Press, 1989, and include the use of washing solution and hybridization conditions (e.g., temperature, ionic strength and % SDS) less stringent that those described above. An example of moderately stringent conditions is overnight incubation at 37° C. in a solution comprising: 20% formamide, 5×SSC (150 mM NaCl, 15 mM trisodium citrate), 50 mM sodium phosphate (pH 7.6), 5× Denhardt's solution, 10% dextran sulfate, and 20 mg/ml denatured sheared salmon sperm DNA, followed by washing the filters in 1×SSC at about 37-50° C. The skilled artisan will recognize how to adjust the temperature, ionic strength, etc. as necessary to accommodate factors such as probe length and the like.

[0584] The term “epitope tagged” when used herein refers to a chimeric polypeptide comprising a TAT polypeptide or anti-TAT antibody fused to a “tag polypeptide”. The tag polypeptide has enough residues to provide an epitope against which an antibody can be made, yet is short enough such that it does not interfere with activity of the polypeptide to which it is fused. The tag polypeptide preferably also is fairly unique so that the antibody does not substantially cross-react with other epitopes. Suitable tag polypeptides generally have at least six amino acid residues and usually between about 8 and 50 amino acid residues (preferably, between about 10 and 20 amino acid residues).

[0585] “Active” or “activity” for the purposes herein refers to form(s) of a TAT polypeptide which retain a biological and/or an immunological activity of native or naturally-occurring TAT, wherein “biological” activity refers to a biological function (either inhibitory or stimulatory) caused by a native or naturally-occurring TAT other than the ability to induce the production of an antibody against an antigenic epitope possessed by a native or naturally-occurring TAT and an “immunological” activity refers to the ability to induce the production of an antibody against an antigenic epitope possessed by a native or naturally-occurring TAT.

[0586] The term “antagonist” is used in the broadest sense, and includes any molecule that partially or fully blocks, inhibits, or neutralizes a biological activity of a native TAT polypeptide disclosed herein. In a similar manner, the term “agonist” is used in the broadest sense and includes any molecule that mimics a biological activity of a native TAT polypeptide disclosed herein. Suitable agonist or antagonist molecules specifically include agonist or antagonist antibodies or antibody fragments, fragments or amino acid sequence variants of native TAT polypeptides, peptides, antisense oligonucleotides, small organic molecules, etc. Methods for identifying agonists or antagonists of a TAT polypeptide may comprise contacting a TAT polypeptide with a candidate agonist or antagonist molecule and measuring a detectable change in one or more biological activities normally associated with the TAT polypeptide.

[0587] “Treating” or “treatment” or “alleviation” refers to both therapeutic treatment and prophylactic or preventative measures, wherein the object is to prevent or slow down (lessen) the targeted pathologic condition or disorder. Those in need of treatment include those already with the disorder as well as those prone to have the disorder or those in whom the disorder is to be prevented. A subject or mammal is successfully “treated” for a TAT polypeptide-expressing cancer if, after receiving a therapeutic amount of an anti-TAT antibody, TAT binding oligopeptide or TAT binding organic molecule according to the methods of the present invention, the patient shows observable and/or measurable reduction in or absence of one or more of the following: reduction in the number of cancer cells or absence of the cancer cells; reduction in the tumor size; inhibition (i.e., slow to some extent and preferably stop) of cancer cell infiltration into peripheral organs including the spread of cancer into soft tissue and bone; inhibition (i.e., slow to some extent and preferably stop) of tumor metastasis; inhibition, to some extent, of tumor growth; and/or relief to some extent, one or more of the symptoms associated with the specific cancer; reduced morbidity and mortality, and improvement in quality of life issues. To the extent the anti-TAT antibody or TAT binding oligopeptide may prevent growth and/or kill existing cancer cells, it may be cytostatic and/or cytotoxic. Reduction of these signs or symptoms may also be felt by the patient.

[0588] The above parameters for assessing successful treatment and improvement in the disease are readily measurable by routine procedures familiar to a physician. For cancer therapy, efficacy can be measured, for example, by assessing the time to disease progression (TTP) and/or determining the response rate (RR). Metastasis can be determined by staging tests and by bone scan and tests for calcium level and other enzymes to determine spread to the bone. CT scans can also be done to look for spread to the pelvis and lymph nodes in the area. Chest X-rays and measurement of liver enzyme levels by known methods are used to look for metastasis to the lungs and liver, respectively. Other routine methods for monitoring the disease include transrectal ultrasonography (TRUS) and transrectal needle biopsy (TRNB).

[0589] For bladder cancer, which is a more localized cancer, methods to determine progress of disease include urinary cytologic evaluation by cystoscopy, monitoring for presence of blood in the urine, visualization of the urothelial tract by sonography or an intravenous pyelogram, computed tomography (CT) and magnetic resonance imaging (MRI). The presence of distant metastases can be assessed by CT of the abdomen, chest x-rays, or radionuclide imaging of the skeleton.

[0590] “Chronic” administration refers to administration of the agent(s) in a continuous mode as opposed to an acute mode, so as to maintain the initial therapeutic effect (activity) for an extended period of time. “Intermittent” administration is treatment that is not consecutively done without interruption, but rather is cyclic in nature.

[0591] “Mammal” for purposes of the treatment of, alleviating the symptoms of or diagnosis of a cancer refers to any animal classified as a mammal, including humans, domestic and farm animals, and zoo, sports, or pet animals, such as dogs, cats, cattle, horses, sheep, pigs, goats, rabbits, etc. Preferably, the mammal is human.

[0592] Administration “in combination with” one or more further therapeutic agents includes simultaneous (concurrent) and consecutive administration in any order.

[0593] “Carriers” as used herein include pharmaceutically acceptable carriers, excipients, or stabilizers which are nontoxic to the cell or mammal being exposed thereto at the dosages and concentrations employed. Often the physiologically acceptable carrier is an aqueous pH buffered solution. Examples of physiologically acceptable carriers include buffers such as phosphate, citrate, and other organic acids; antioxidants including ascorbic acid; low molecular weight (less than about 10 residues) polypeptide; proteins, such as serum albumin, gelatin, or immunoglobulins; hydrophilic polymers such as polyvinylpyrrolidone; amino acids such as glycine, glutamine, asparagine, arginine or lysine; monosaccharides, disaccharides, and other carbohydrates including glucose, mannose, or dextrins; chelating agents such as EDTA; sugar alcohols such as mannitol or sorbitol; salt-forming counterions such as sodium; and/or nonionic surfactants such as TWEEN®, polyethylene glycol (PEG), and PLURONICS®.

[0594] By “solid phase” or “solid support” is meant a non-aqueous matrix to which an antibody, TAT binding oligopeptide or TAT binding organic molecule of the present invention can adhere or attach. Examples of solid phases encompassed herein include those formed partially or entirely of glass (e.g., controlled pore glass), polysaccharides (e.g., agarose), polyacrylamides, polystyrene, polyvinyl alcohol and silicones. In certain embodiments, depending on the context, the solid phase can comprise the well of an assay plate; in others it is a purification column (e.g., an affinity chromatography column). This term also includes a discontinuous solid phase of discrete particles, such as those described in U.S. Pat. No. 4,275,149.

[0595] A “liposome” is a small vesicle composed of various types of lipids, phospholipids and/or surfactant which is useful for delivery of a drug (such as a TAT polypeptide, an antibody thereto or a TAT binding oligopeptide) to a mammal. The components of the liposome are commonly arranged in a bilayer formation, similar to the lipid arrangement of biological membranes.

[0596] A “small” molecule or “small” organic molecule is defined herein to have a molecular weight below about 500 Daltons.

[0597] An “effective amount” of a polypeptide, antibody, TAT binding oligopeptide, TAT binding organic molecule or an agonist or antagonist thereof as disclosed herein is an amount sufficient to carry out a specifically stated purpose. An “effective amount” may be determined empirically and in a routine manner, in relation to the stated purpose.

[0598] The term “therapeutically effective amount” refers to an amount of an antibody, polypeptide, TAT binding oligopeptide, TAT binding organic molecule or other drug effective to “treat” a disease or disorder in a subject or mammal. In the case of cancer, the therapeutically effective amount of the drug may reduce the number of cancer cells; reduce the tumor size; inhibit (i.e., slow to some extent and preferably stop) cancer cell infiltration into peripheral organs; inhibit (i.e., slow to some extent and preferably stop) tumor metastasis; inhibit, to some extent, tumor growth; and/or relieve to some extent one or more of the symptoms associated with the cancer. See the definition herein of “treating”. To the extent the drug may prevent growth and/or kill existing cancer cells, it may be cytostatic and/or cytotoxic.

[0599] A “growth inhibitory amount” of an anti-TAT antibody, TAT polypeptide, TAT binding oligopeptide or TAT binding organic molecule is an amount capable of inhibiting the growth of a cell, especially tumor, e.g., cancer cell, either in vitro or in vivo. A “growth inhibitory amount” of an anti-TAT antibody, TAT polypeptide, TAT binding oligopeptide or TAT binding organic molecule for purposes of inhibiting neoplastic cell growth may be determined empirically and in a routine manner.

[0600] A “cytotoxic amount” of an anti-TAT antibody, TAT polypeptide, TAT binding oligopeptide or TAT binding organic molecule is an amount capable of causing the destruction of a cell, especially tumor, e.g., cancer cell, either in vitro or in vivo. A “cytotoxic amount” of an anti-TAT antibody, TAT polypeptide, TAT binding oligopeptide or TAT binding organic molecule for purposes of inhibiting neoplastic cell growth may be determined empirically and in a routine manner.

[0601] The term “antibody” is used in the broadest sense and specifically covers, for example, single anti-TAT monoclonal antibodies (including agonist, antagonist, and neutralizing antibodies), anti-TAT antibody compositions with polyepitopic specificity, polyclonal antibodies, single chain anti-TAT antibodies, and fragments of anti-TAT antibodies (see below) as long as they exhibit the desired biological or immunological activity. The term “immunoglobulin” (Ig) is used interchangeable with antibody herein.

[0602] An “isolated antibody” is one which has been identified and separated and/or recovered from a component of its natural environment. Contaminant components of its natural environment are materials which would interfere with diagnostic or therapeutic uses for the antibody, and may include enzymes, hormones, and other proteinaceous or nonproteinaceous solutes. In preferred embodiments, the antibody will be purified (1) to greater than 95% by weight of antibody as determined by the Lowry method, and most preferably more than 99% by weight, (2) to a degree sufficient to obtain at least 15 residues of N-terminal or internal amino acid sequence by use of a spinning cup sequenator, or (3) to homogeneity by SDS-PAGE under reducing or nonreducing conditions using Coomassie blue or, preferably, silver stain. Isolated antibody includes the antibody in situ within recombinant cells since at least one component of the antibody's natural environment will not be present. Ordinarily, however, isolated antibody will be prepared by at least one purification step.

[0603] The basic 4-chain antibody unit is a heterotetrameric glycoprotein composed of two identical light (L) chains and two identical heavy (H) chains (an IgM antibody consists of 5 of the basic heterotetramer unit along with an additional polypeptide called J chain, and therefore contain 10 antigen binding sites, while secreted IgA antibodies can polymerize to form polyvalent assemblages comprising 2-5 of the basic 4-chain units along with J chain). In the case of IgGs, the 4-chain unit is generally about 150,000 daltons. Each L chain is linked to a H chain by one covalent disulfide bond, while the two H chains are linked to each other by one or more disulfide bonds depending on the H chain isotype. Each H and L chain also has regularly spaced intrachain disulfide bridges. Each H chain has at the N-terminus, a variable domain (V_{H}) followed by three constant domains (C_{H}) for each of the α and γ chains and four C_{H} domains for μ and ε isotypes. Each L chain has at the N-terminus, a variable domain (V_{L}) followed by a constant domain (C_{L}) at its other end. The V_{L} is aligned with the V_{H} and the C_{L} is aligned with the first constant domain of the heavy chain (C_{H}1). Particular amino acid residues are believed to form an interface between the light chain and heavy chain variable domains. The pairing of a V_{H} and V_{L} together forms a single antigen-binding site. For the structure and properties of the different classes of antibodies, see, e.g., Basic and Clinical Immunology, 8th edition, Daniel P. Stites, Abba I. Terr and Tristram G. Parslow (eds.), Appleton & Lange, Norwalk, Conn., 1994, page 71 and Chapter 6.

[0604] The L chain from any vertebrate species can be assigned to one of two clearly distinct types, called kappa and lambda, based on the amino acid sequences of their constant domains. Depending on the amino acid sequence of the constant domain of their heavy chains (C_{H}) immunoglobulins can be assigned to different classes or isotypes. There are five classes of immunoglobulins: IgA, IgD, IgE, IgG, and IgM, having heavy chains designated α, δ, ε, γ, and μ, respectively. The γ and α classes are further divided into subclasses on the basis of relatively minor differences in C_{H} sequence and function, e.g., humans express the following subclasses: IgG1, IgG2, IgG3, IgG4, IgA1, and IgA2.

[0605] The term “variable” refers to the fact that certain segments of the variable domains differ extensively in sequence among antibodies. The V domain mediates antigen binding and define specificity of a particular antibody for its particular antigen. However, the variability is not evenly distributed across the 110-amino acid span of the variable domains. Instead, the V regions consist of relatively invariant stretches called framework regions (FRs) of 15-30 amino acids separated by shorter regions of extreme variability called “hypervariable regions” that are each 9-12 amino acids long. The variable domains of native heavy and light chains each comprise four FRs, largely adopting a β-sheet configuration, connected by three hypervariable regions, which form loops connecting, and in some cases forming part of, the β-sheet structure. The hypervariable regions in each chain are held together in close proximity by the FRs and, with the hypervariable regions from the other chain, contribute to the formation of the antigen-binding site of antibodies (see Kabat et al., Sequences of Proteins of Immunological Interest, 5th Ed. Public Health Service, National Institutes of Health, Bethesda, Md. (1991)). The constant domains are not involved directly in binding an antibody to an antigen, but exhibit various effector functions, such as participation of the antibody in antibody dependent cellular cytotoxicity (ADCC).

[0606] The term “hypervariable region” when used herein refers to the amino acid residues of an antibody which are responsible for antigen-binding. The hypervariable region generally comprises amino acid residues from a “complementarity determining region” or “CDR” (e.g. around about residues 24-34 (L1), 50-56 (L2) and 89-97 (L3) in the V_{L}, and around about 1-35 (H1), 50-65 (H2) and 95-102 (H3) in the V_{H}; Kabat et al., Sequences of Proteins of Immunological Interest, 5th Ed. Public Health Service, National Institutes of Health, Bethesda, Md. (1991)) and/or those residues from a “hypervariable loop” (e.g. residues 26-32 (L1), 50-52 (L2) and 91-96 (L3) in the V_{L}, and 26-32 (H1), 53-55 (H2) and 96-101 (H3) in the V_{H}; Chothia and Lesk J. Mol. Biol. 196:901-917 (1987)).

[0607] The term “monoclonal antibody” as used herein refers to an antibody obtained from a population of substantially homogeneous antibodies, i.e., the individual antibodies comprising the population are identical except for possible naturally occurring mutations that may be present in minor amounts. Monoclonal antibodies are highly specific, being directed against a single antigenic site. Furthermore, in contrast to polyclonal antibody preparations which include different antibodies directed against different determinants (epitopes), each monoclonal antibody is directed against a single determinant on the antigen. In addition to their specificity, the monoclonal antibodies are advantageous in that they may be synthesized uncontaminated by other antibodies. The modifier “monoclonal” is not to be construed as requiring production of the antibody by any particular method. For example, the monoclonal antibodies useful in the present invention may be prepared by the hybridoma methodology first described by Kohler et al., Nature, 256:495 (1975), or may be made using recombinant DNA methods in bacterial, eukaryotic animal or plant cells (see, e.g., U.S. Pat. No. 4,816,567). The “monoclonal antibodies” may also be isolated from phage antibody libraries using the techniques described in Clackson et al., Nature, 352:624-628 (1991) and Marks et al., J. Mol. Biol., 222:581-597 (1991), for example.

[0608] The monoclonal antibodies herein include “chimeric” antibodies in which a portion of the heavy and/or light chain is identical with or homologous to corresponding sequences in antibodies derived from a particular species or belonging to a particular antibody class or subclass, while the remainder of the chain(s) is identical with or homologous to corresponding sequences in antibodies derived from another species or belonging to another antibody class or subclass, as well as fragments of such antibodies, so long as they exhibit the desired biological activity (see U.S. Pat. No. 4,816,567; and Morrison et al., Proc. Natl. Acad. Sci. USA, 81:6851-6855 (1984)). Chimeric antibodies of interest herein include “primatized” antibodies comprising variable domain antigen-binding sequences derived from a non-human primate (e.g. Old World Monkey, Ape etc), and human constant region sequences.

[0609] An “intact” antibody is one which comprises an antigen-binding site as well as a C_{L} and at least heavy chain constant domains, C_{H}1, C_{H}2 and C_{H}3. The constant domains may be native sequence constant domains (e.g. human native sequence constant domains) or amino acid sequence variant thereof. Preferably, the intact antibody has one or more effector functions.

[0610] “Antibody fragments” comprise a portion of an intact antibody, preferably the antigen binding or variable region of the intact antibody. Examples of antibody fragments include Fab, Fab′, F(ab′)₂, and Fv fragments; diabodies; linear antibodies (see U.S. Pat. No. 5,641,870, Example 2; Zapata et al., Protein Eng. 8(10): 1057-1062 [1995]); single-chain antibody molecules; and multispecific antibodies formed from antibody fragments.

[0611] Papain digestion of antibodies produces two identical antigen-binding fragments, called “Fab” fragments, and a residual “Fc” fragment, a designation reflecting the ability to crystallize readily. The Fab fragment consists of an entire L chain along with the variable region domain of the H chain (V_{H}), and the first constant domain of one heavy chain (C_{H}1). Each Fab fragment is monovalent with respect to antigen binding, i.e., it has a single antigen-binding site. Pepsin treatment of an antibody yields a single large F(ab₂′) fragment which roughly corresponds to two disulfide linked Fab fragments having divalent antigen-binding activity and is still capable of cross-linking antigen. Fab′ fragments differ from Fab fragments by having additional few residues at the carboxy terminus of the C_{H}1 domain including one or more cysteines from the antibody hinge region. Fab′-SH is the designation herein for Fab′ in which the cysteine residue(s) of the constant domains bear a free thiol group. F(ab′)₂ antibody fragments originally were produced as pairs of Fab′ fragments which have hinge cysteines between them. Other chemical couplings of antibody fragments are also known.

[0612] The Fc fragment comprises the carboxy-terminal portions of both H chains held together by disulfides. The effector functions of antibodies are determined by sequences in the Fc region, which region is also the part recognized by Fc receptors (FcR) found on certain types of cells.

[0613] “Fv” is the minimum antibody fragment which contains a complete antigen-recognition and -binding site. This fragment consists of a dimer of one heavy- and one light-chain variable region domain in tight, non-covalent association. From the folding of these two domains emanate six hypervariable loops (3 loops each from the H and L chain) that contribute the amino acid residues for antigen binding and confer antigen binding specificity to the antibody. However, even a single variable domain (or half of an Fv comprising only three CDRs specific for an antigen) has the ability to recognize and bind antigen, although at a lower affinity than the entire binding site.

[0614] “Single-chain Fv” also abbreviated as “sFv” or “scFv” are antibody fragments that comprise the V_{H} and V_{L} antibody domains connected into a single polypeptide chain. Preferably, the sFv polypeptide further comprises a polypeptide linker between the V_{H} and V_{L} domains which enables the sFv to form the desired structure for antigen binding. For a review of sFv, see Pluckthun in The Pharmacology of Monoclonal Antibodies, vol. 113, Rosenburg and Moore eds., Springer-Verlag, New York, pp. 269-315 (1994); Borrebaeck 1995, infra.

[0615] The term “diabodies” refers to small antibody fragments prepared by constructing sFv fragments (see preceding paragraph) with short linkers (about 5-10 residues) between the V_{H} and V_{L} domains such that inter-chain but not intra-chain pairing of the V domains is achieved, resulting in a bivalent fragment, i.e., fragment having two antigen-binding sites. Bispecific diabodies are heterodimers of two “crossover” sFv fragments in which the V_{H} and V_{L} domains of the two antibodies are present on different polypeptide chains. Diabodies are described more fully in, for example, EP 404,097; WO 93/11161; and Hollinger et al., Proc. Natl. Acad. Sci. USA, 90:6444-6448 (1993).

[0616] “Humanized” forms of non-human (e.g., rodent) antibodies are chimeric antibodies that contain minimal sequence derived from the non-human antibody. For the most part, humanized antibodies are human immunoglobulins (recipient antibody) in which residues from a hypervariable region of the recipient are replaced by residues from a hypervariable region of a non-human species (donor antibody) such as mouse, rat, rabbit or non-human primate having the desired antibody specificity, affinity, and capability. In some instances, framework region (FR) residues of the human immunoglobulin are replaced by corresponding non-human residues. Furthermore, humanized antibodies may comprise residues that are not found in the recipient antibody or in the donor antibody. These modifications are made to further refine antibody performance. In general, the humanized antibody will comprise substantially all of at least one, and typically two, variable domains, in which all or substantially all of the hypervariable loops correspond to those of a non-human immunoglobulin and all or substantially all of the FRs are those of a human immunoglobulin sequence. The humanized antibody optionally also will comprise at least a portion of an immunoglobulin constant region (Fc), typically that of a human immunoglobulin. For further details, see Jones et al., Nature 321:522-525 (1986); Riechmann et al., Nature 332:323-329 (1988); and Presta, Curr. Op. Struct. Biol. 2:593-596 (1992).

[0617] A “species-dependent antibody,” e.g., a mammalian anti-human IgE antibody, is an antibody which has a stronger binding affinity for an antigen from a first mammalian species than it has for a homologue of that antigen from a second mammalian species. Normally, the species-dependent antibody “bind specifically” to a human antigen (i.e., has a binding affinity (Kd) value of no more than about 1×10⁻⁷ M, preferably no more than about 1×10⁻⁸ and most preferably no more than about 1×10⁻⁹ M) but has a binding affinity for a homologue of the antigen from a second non-human mammalian species which is at least about 50 fold, or at least about 500 fold, or at least about 1000 fold, weaker than its binding affinity for the human antigen. The species-dependent antibody can be of any of the various types of antibodies as defined above, but preferably is a humanized or human antibody.

[0618] A “TAT binding oligopeptide” is an oligopeptide that binds, preferably specifically, to a TAT polypeptide as described herein. TAT binding oligopeptides may be chemically synthesized using known oligopeptide synthesis methodology or may be prepared and purified using recombinant technology. TAT binding oligopeptides are usually at least about 5 amino acids in length, alternatively at least about 6, 7, 8, 9, 10, 11, 12, 13, 14, 15, 16, 17, 18, 19, 20, 21, 22, 23, 24, 25, 26, 27, 28, 29, 30, 31, 32, 33, 34, 35, 36, 37, 38, 39, 40, 41, 42, 43, 44, 45, 46, 47, 48, 49, 50, 51, 52, 53, 54, 55, 56, 57, 58, 59, 60, 61, 62, 63, 64, 65, 66, 67, 68, 69, 70, 71, 72, 73, 74, 75, 76, 77, 78, 79, 80, 81, 82, 83, 84, 85, 86, 87, 88, 89, 90, 91, 92, 93, 94, 95, 96, 97, 98, 99, or 100 amino acids in length or more, wherein such oligopeptides that are capable of binding, preferably specifically, to a TAT polypeptide as described herein. TAT binding oligopeptides may be identified without undue experimentation using well known techniques. In this regard, it is noted that techniques for screening oligopeptide libraries for oligopeptides that are capable of specifically binding to a polypeptide target are well known in the art (see, e.g., U.S. Pat. Nos. 5,556,762, 5,750,373, 4,708,871, 4,833,092, 5,223,409, 5,403,484, 5,571,689, 5,663,143; PCT Publication Nos. WO 84/03506 and WO84/03564; Geysen et al., Proc. Natl. Acad. Sci. U.S.A., 81:3998-4002 (1984); Geysen et al., Proc. Natl. Acad. Sci. U.S.A., 82:178-182 (1985); Geysen et al., in Synthetic Peptides as Antigens, 130-149 (1986); Geysen et al., J. Immunol. Meth., 102:259-274 (1987); Schoofs et al., J. Immunol., 140:611-616 (1988), Cwirla, S. E. et al. (1990) Proc. Natl. Acad. Sci. USA, 87:6378; Lowman, H. B. et al. (1991) Biochemistry, 30:10832; Clackson, T. et al. (1991) Nature, 352: 624; Marks, J. D. et al. (1991), J. Mol. Biol., 222:581; Kang, A. S. et al. (1991) Proc. Natl. Acad. Sci. USA, 88:8363, and Smith, G. P. (1991) Current Opin. Biotechnol., 2:668).

[0619] A “TAT binding organic molecule” is an organic molecule other than an oligopeptide or antibody as defined herein that binds, preferably specifically, to a TAT polypeptide as described herein. TAT binding organic molecules may be identified and chemically synthesized using known methodology (see, e.g., PCT Publication Nos. WO00/00823 and WO00/39585). TAT binding organic molecules are usually less than about 2000 daltons in size, alternatively less than about 1500, 750, 500, 250 or 200 daltons in size, wherein such organic molecules that are capable of binding, preferably specifically, to a TAT polypeptide as described herein may be identified without undue experimentation using well known techniques. In this regard, it is noted that techniques for screening organic molecule libraries for molecules that are capable of binding to a polypeptide target are well known in the art (see, e.g., PCT Publication Nos. WO00/00823 and WO00/39585).

[0620] An antibody, oligopeptide or other organic molecule “which binds” an antigen of interest, e.g. a tumor-associated polypeptide antigen target, is one that binds the antigen with sufficient affinity such that the antibody, oligopeptide or other organic molecule is useful as a diagnostic and/or therapeutic agent in targeting a cell or tissue expressing the antigen, and does not significantly cross-react with other proteins. In such embodiments, the extent of binding of the antibody, oligopeptide or other organic molecule to a “non-target” protein will be less than about 10% of the binding of the antibody, oligopeptide or other organic molecule to its particular target protein as determined by fluorescence activated cell sorting (FACS) analysis or radioimmunoprecipitation (RIA). With regard to the binding of an antibody, oligopeptide or other organic molecule to a target molecule, the term “specific binding” or “specifically binds to” or is “specific for” a particular polypeptide or an epitope on a particular polypeptide target means binding that is measurably different from a non-specific interaction. Specific binding can be measured, for example, by determining binding of a molecule compared to binding of a control molecule, which generally is a molecule of similar structure that does not have binding activity. For example, specific binding can be determined by competition with a control molecule that is similar to the target, for example, an excess of non-labeled target. In this case, specific binding is indicated if the binding of the labeled target to a probe is competitively inhibited by excess unlabeled target. The term “specific binding” or “specifically binds to” or is “specific for” a particular polypeptide or an epitope on a particular polypeptide target as used herein can be exhibited, for example, by a molecule having a Kd for the target of at least about 10⁻⁴ M, alternatively at least about 10⁻⁵ M, alternatively at least about 10⁻⁶ M, alternatively at least about 10⁻⁷ M, alternatively at least about 10⁻⁸ M, alternatively at least about 10⁻⁹ M, alternatively at least about 10⁻¹⁰ M, alternatively at least about 10⁻¹¹ M, alternatively at least about 10⁻¹² M, or greater. In one embodiment, the term “specific binding” refers to binding where a molecule binds to a particular polypeptide or epitope on a particular polypeptide without substantially binding to any other polypeptide or polypeptide epitope.

[0621] An antibody, oligopeptide or other organic molecule that “inhibits the growth of tumor cells expressing a TAT polypeptide” or a “growth inhibitory” antibody, oligopeptide or other organic molecule is one which results in measurable growth inhibition of cancer cells expressing or overexpressing the appropriate TAT polypeptide. The TAT polypeptide may be a transmembrane polypeptide expressed on the surface of a cancer cell or may be a polypeptide that is produced and secreted by a cancer cell. Preferred growth inhibitory anti-TAT antibodies, oligopeptides or organic molecules inhibit growth of TAT-expressing tumor cells by greater than 20%, preferably from about 20% to about 50%, and even more preferably, by greater than 50% (e.g., from about 50% to about 100%) as compared to the appropriate control, the control typically being tumor cells not treated with the antibody, oligopeptide or other organic molecule being tested. In one embodiment, growth inhibition can be measured at an antibody concentration of about 0.1 to 30 μg/ml or about 0.5 nM to 200 nM in cell culture, where the growth inhibition is determined 1-10 days after exposure of the tumor cells to the antibody. Growth inhibition of tumor cells in vivo can be determined in various ways such as is described in the Experimental Examples section below. The antibody is growth inhibitory in vivo if administration of the anti-TAT antibody at about 1 μg/kg to about 100 mg/kg body weight results in reduction in tumor size or tumor cell proliferation within about 5 days to 3 months from the first administration of the antibody, preferably within about 5 to 30 days.

[0622] An antibody, oligopeptide or other organic molecule which “induces apoptosis” is one which induces programmed cell death as determined by binding of annexin V, fragmentation of DNA, cell shrinkage, dilation of endoplasmic reticulum, cell fragmentation, and/or formation of membrane vesicles (called apoptotic bodies). The cell is usually one which overexpresses a TAT polypeptide. Preferably the cell is a tumor cell, e.g., a prostate, breast, ovarian, stomach, endometrial, lung, kidney, colon, bladder cell. Various methods are available for evaluating the cellular events associated with apoptosis. For example, phosphatidyl serine (PS) translocation can be measured by annexin binding; DNA fragmentation can be evaluated through DNA laddering; and nuclear/chromatin condensation along with DNA fragmentation can be evaluated by any increase in hypodiploid cells. Preferably, the antibody, oligopeptide or other organic molecule which induces apoptosis is one which results in about 2 to 50 fold, preferably about 5 to 50 fold, and most preferably about 10 to 50 fold, induction of annexin binding relative to untreated cell in an annexin binding assay.

[0623] Antibody “effector functions” refer to those biological activities attributable to the Fc region (a native sequence Fc region or amino acid sequence variant Fc region) of an antibody, and vary with the antibody isotype. Examples of antibody effector functions include: C1q binding and complement dependent cytotoxicity; Fc receptor binding; antibody-dependent cell-mediated cytotoxicity (ADCC); phagocytosis; down regulation of cell surface receptors (e.g., B cell receptor); and B cell activation.

[0624] “Antibody-dependent cell-mediated cytotoxicity” or “ADCC” refers to a form of cytotoxicity in which secreted Ig bound onto Fc receptors (FcRs) present on certain cytotoxic cells (e.g., Natural Killer (NK) cells, neutrophils, and macrophages) enable these cytotoxic effector cells to bind specifically to an antigen-bearing target cell and subsequently kill the target cell with cytotoxins. The antibodies “arm” the cytotoxic cells and are absolutely required for such killing. The primary cells for mediating ADCC, NK cells, express FcγRIII only, whereas monocytes express FcγRI, FcγRII and FcγRIII. FcR expression on hematopoietic cells is summarized in Table 3 on page 464 of Ravetch and Kinet, Annu. Rev. Immunol. 9:457-92 (1991). To assess ADCC activity of a molecule of interest, an in vitro ADCC assay, such as that described in U.S. Pat. No. 5,500,362 or U.S. Pat. No. 5,821,337 may be performed. Useful effector cells for such assays include peripheral blood mononuclear cells (PBMC) and Natural Killer (NK) cells. Alternatively, or additionally, ADCC activity of the molecule of interest may be assessed in vivo, e.g., in a animal model such as that disclosed in Clynes et al. (USA) 95:652-656 (1998).

[0625] “Fc receptor” or “FcR” describes a receptor that binds to the Fc region of an antibody. The preferred FcR is a native sequence human FcR. Moreover, a preferred FcR is one which binds an IgG antibody (a gamma receptor) and includes receptors of the FcγRI, FcγRII and FcγRIII subclasses, including allelic variants and alternatively spliced forms of these receptors. FcγRII receptors include FcγRIIA (an “activating receptor”) and FcγRIIB (an “inhibiting receptor”), which have similar amino acid sequences that differ primarily in the cytoplasmic domains thereof. Activating receptor FcγRIIA contains an immunoreceptor tyrosine-based activation motif (ITAM) in its cytoplasmic domain. Inhibiting receptor FcγRIIB contains an immunoreceptor tyrosine-based inhibition motif (ITIM) in its cytoplasmic domain. (see review M. in Daëron, Annu. Rev. Immunol. 15:203-234 (1997)). FcRs are reviewed in Ravetch and Kinet, Annu. Rev. Immunol. 9:457-492 (1991); Capel et al., Immunomethods 4:25-34 (1994); and de Haas et al., J. Lab. Clin. Med. 126:330-41 (1995). Other FcRs, including those to be identified in the future, are encompassed by the term “FcR” herein.

[0626] The term also includes the neonatal receptor, FcRn, which is responsible for the transfer of maternal IgGs to the fetus (Guyer et al., J. Immunol. 117:587 (1976) and Kim et al., J. Immunol. 24:249 (1994)).

[0627] “Human effector cells” are leukocytes which express one or more FcRs and perform effector functions. Preferably, the cells express at least FcγRIII and perform ADCC effector function. Examples of human leukocytes which mediate ADCC include peripheral blood mononuclear cells (PBMC), natural killer (NK) cells, monocytes, cytotoxic T cells and neutrophils; with PBMCs and NK cells being preferred. The effector cells may be isolated from a native source, e.g., from blood.

[0628] “Complement dependent cytotoxicity” or “CDC” refers to the lysis of a target cell in the presence of complement. Activation of the classical complement pathway is initiated by the binding of the first component of the complement system (C1q) to antibodies (of the appropriate subclass) which are bound to their cognate antigen. To assess complement activation, a CDC assay, e.g., as described in Gazzano-Santoro et al., J. Immunol. Methods 202:163 (1996), may be performed.

[0629] The terms “cancer” and “cancerous” refer to or describe the physiological condition in mammals that is typically characterized by unregulated cell growth. Examples of cancer include, but are not limited to, carcinoma, lymphoma, blastoma, sarcoma, and leukemia or lymphoid malignancies. More particular examples of such cancers include squamous cell cancer (e.g., epithelial squamous cell cancer), lung cancer including small-cell lung cancer, non-small cell lung cancer, adenocarcinoma of the lung and squamous carcinoma of the lung, cancer of the peritoneum, hepatocellular cancer, gastric or stomach cancer including gastrointestinal cancer, pancreatic cancer, glioblastoma, cervical cancer, ovarian cancer, liver cancer, bladder cancer, cancer of the urinary tract, hepatoma, breast cancer, colon cancer, rectal cancer, colorectal cancer, endometrial or uterine carcinoma, salivary gland carcinoma, kidney or renal cancer, prostate cancer, vulval cancer, thyroid cancer, hepatic carcinoma, anal carcinoma, penile carcinoma, melanoma, multiple myeloma and B-cell lymphoma, brain, as well as head and neck cancer, and associated metastases.

[0630] The terms “cell proliferative disorder” and “proliferative disorder” refer to disorders that are associated with some degree of abnormal cell proliferation. In one embodiment, the cell proliferative disorder is cancer.

[0631] “Tumor”, as used herein, refers to all neoplastic cell growth and proliferation, whether malignant or benign, and all pre-cancerous and cancerous cells and tissues.

[0632] An antibody, oligopeptide or other organic molecule which “induces cell death” is one which causes a viable cell to become nonviable. The cell is one which expresses a TAT polypeptide, preferably a cell that overexpresses a TAT polypeptide as compared to a normal cell of the same tissue type. The TAT polypeptide may be a transmembrane polypeptide expressed on the surface of a cancer cell or may be a polypeptide that is produced and secreted by a cancer cell. Preferably, the cell is a cancer cell, e.g., a breast, ovarian, stomach, endometrial, salivary gland, lung, kidney, colon, thyroid, pancreatic or bladder cell. Cell death in vitro may be determined in the absence of complement and immune effector cells to distinguish cell death induced by antibody-dependent cell-mediated cytotoxicity (ADCC) or complement dependent cytotoxicity (CDC). Thus, the assay for cell death may be performed using heat inactivated serum (i.e., in the absence of complement) and in the absence of immune effector cells. To determine whether the antibody, oligopeptide or other organic molecule is able to induce cell death, loss of membrane integrity as evaluated by uptake of propidium iodide (PI), trypan blue (see Moore et al. Cytotechnology 17:1-11 (1995)) or 7AAD can be assessed relative to untreated cells. Preferred cell death-inducing antibodies, oligopeptides or other organic molecules are those which induce PI uptake in the PI uptake assay in BT474 cells.

[0633] A “TAT-expressing cell” is a cell which expresses an endogenous or transfected TAT polypeptide either on the cell surface or in a secreted form. A “TAT-expressing cancer” is a cancer comprising cells that have a TAT polypeptide present on the cell surface or that produce and secrete a TAT polypeptide. A “TAT-expressing cancer” optionally produces sufficient levels of TAT polypeptide on the surface of cells thereof, such that an anti-TAT antibody, oligopeptide ot other organic molecule can bind thereto and have a therapeutic effect with respect to the cancer. In another embodiment, a “TAT-expressing cancer” optionally produces and secretes sufficient levels of TAT polypeptide, such that an anti-TAT antibody, oligopeptide ot other organic molecule antagonist can bind thereto and have a therapeutic effect with respect to the cancer. With regard to the latter, the antagonist may be an antisense oligonucleotide which reduces, inhibits or prevents production and secretion of the secreted TAT polypeptide by tumor cells. A cancer which “overexpresses” a TAT polypeptide is one which has significantly higher levels of TAT polypeptide at the cell surface thereof, or produces and secretes, compared to a noncancerous cell of the same tissue type. Such overexpression may be caused by gene amplification or by increased transcription or translation. TAT polypeptide overexpression may be determined in a diagnostic or prognostic assay by evaluating increased levels of the TAT protein present on the surface of a cell, or secreted by the cell (e.g., via an immunohistochemistry assay using anti-TAT antibodies prepared against an isolated TAT polypeptide which may be prepared using recombinant DNA technology from an isolated nucleic acid encoding the TAT polypeptide; FACS analysis, etc.). Alternatively, or additionally, one may measure levels of TAT polypeptide-encoding nucleic acid or mRNA in the cell, e.g., via fluorescent in situ hybridization using a nucleic acid based probe corresponding to a TAT-encoding nucleic acid or the complement thereof; (FISH; see WO98/45479 published October, 1998), Southern blotting, Northern blotting, or polymerase chain reaction (PCR) techniques, such as real time quantitative PCR (RT-PCR). One may also study TAT polypeptide overexpression by measuring shed antigen in a biological fluid such as serum, e.g, using antibody-based assays (see also, e.g., U.S. Pat. No. 4,933,294 issued Jun. 12, 1990; WO91/05264 published Apr. 18, 1991; U.S. Pat. No. 5,401,638 issued Mar. 28, 1995; and Sias et al., J. Immunol. Methods 132:73-80 (1990)). Aside from the above assays, various in vivo assays are available to the skilled practitioner. For example, one may expose cells within the body of the patient to an antibody which is optionally labeled with a detectable label, e.g., a radioactive isotope, and binding of the antibody to cells in the patient can be evaluated, e.g., by external scanning for radioactivity or by analyzing a biopsy taken from a patient previously exposed to the antibody.

[0634] As used herein, the term “immunoadhesin” designates antibody-like molecules which combine the binding specificity of a heterologous protein (an “adhesin”) with the effector functions of immunoglobulin constant domains. Structurally, the immunoadhesins comprise a fusion of an amino acid sequence with the desired binding specificity which is other than the antigen recognition and binding site of an antibody (i.e., is “heterologous”), and an immunoglobulin constant domain sequence. The adhesin part of an immunoadhesin molecule typically is a contiguous amino acid sequence comprising at least the binding site of a receptor or a ligand. The immunoglobulin constant domain sequence in the immunoadhesin may be obtained from any immunoglobulin, such as IgG-1, IgG-2, IgG-3, or IgG-4 subtypes, IgA (including IgA-1 and IgA-2), IgE, IgD or IgM.

[0635] The word “label” when used herein refers to a detectable compound or composition which is conjugated directly or indirectly to the antibody, oligopeptide or other organic molecule so as to generate a “labeled” antibody, oligopeptide or other organic molecule. The label may be detectable by itself (e.g. radioisotope labels or fluorescent labels) or, in the case of an enzymatic label, may catalyze chemical alteration of a substrate compound or composition which is detectable.

[0636] The term “cytotoxic agent” as used herein refers to a substance that inhibits or prevents the function of cells and/or causes destruction of cells. The term is intended to include radioactive isotopes (e.g., At²¹¹, I¹³¹, I¹²⁵, Y⁹⁰, Re¹⁸⁶, Re¹⁸⁸, Sm¹⁵³, Bi²¹², P³² and radioactive isotopes of Lu), chemotherapeutic agents e.g. methotrexate, adriamicin, vinca alkaloids (vincristine, vinblastine, etoposide), doxorubicin, melphalan, mitomycin C, chlorambucil, daunorubicin or other intercalating agents, enzymes and fragments thereof such as nucleolytic enzymes, antibiotics, and toxins such as small molecule toxins or enzymatically active toxins of bacterial, fungal, plant or animal origin, including fragments and/or variants thereof, and the various antitumor or anticancer agents disclosed below. Other cytotoxic agents are described below. A tumoricidal agent causes destruction of tumor cells.

[0637] A “growth inhibitory agent” when used herein refers to a compound or composition which inhibits growth of a cell, especially a TAT-expressing cancer cell, either in vitro or in vivo. Thus, the growth inhibitory agent may be one which significantly reduces the percentage of TAT-expressing cells in S phase. Examples of growth inhibitory agents include agents that block cell cycle progression (at a place other than S phase), such as agents that induce G1 arrest and M-phase arrest. Classical M-phase blockers include the vincas (vincristine and vinblastine), taxanes, and topoisomerase II inhibitors such as doxorubicin, epirubicin, daunorubicin, etoposide, and bleomycin. Those agents that arrest G1 also spill over into S-phase arrest, for example, DNA alkylating agents such as tamoxifen, prednisone, dacarbazine, mechlorethamine, cisplatin, methotrexate, 5-fluorouracil, and ara-C. Further information can be found in The Molecular Basis of Cancer, Mendelsohn and Israel, eds., Chapter 1, entitled “Cell cycle regulation, oncogenes, and antineoplastic drugs” by Murakami et al. (W B Saunders: Philadelphia, 1995), especially p. 13. The taxanes (paclitaxel and docetaxel) are anticancer drugs both derived from the yew tree. Docetaxel (TAXOTERE®, Rhone-Poulenc Rorer), derived from the European yew, is a semisynthetic analogue of paclitaxel (TAXOL®, Bristol-Myers Squibb). Paclitaxel and docetaxel promote the assembly of microtubules from tubulin dimers and stabilize microtubules by preventing depolymerization, which results in the inhibition of mitosis in cells.

[0638] “Doxorubicin” is an anthracycline antibiotic. The full chemical name of doxorubicin is (8S-cis)-10-[(3-amino-2,3,6-trideoxy-α-L-lyxo-hexapyranosyl)oxy]-7,8,9,10-tetrahydro-6,8,11-trihydroxy-8-(hydroxyacetyl)-1-methoxy-5,12-naphthacenedione.

[0639] The term “cytokine” is a generic term for proteins released by one cell population which act on another cell as intercellular mediators. Examples of such cytokines are lymphokines, monokines, and traditional polypeptide hormones. Included among the cytokines are growth hormone such as human growth hormone, N-methionyl human growth hormone, and bovine growth hormone; parathyroid hormone; thyroxine; insulin; proinsulin; relaxin; prorelaxin; glycoprotein hormones such as follicle stimulating hormone (FSH), thyroid stimulating hormone (TSH), and luteinizing hormone (LH); hepatic growth factor; fibroblast growth factor; prolactin; placental lactogen; tumor necrosis factor-α and -β; mullerian-inhibiting substance; mouse gonadotropin-associated peptide; inhibin; activin; vascular endothelial growth factor; integrin; thrombopoietin (TPO); nerve growth factors such as NGF-β; platelet-growth factor; transforming growth factors (TGFs) such as TGF-α and TGF-β; insulin-like growth factor-I and -II; erythropoietin (EPO); osteoinductive factors; interferons such as interferon-α, -β, and -γ; colony stimulating factors (CSFs) such as macrophage-CSF (M-CSF); granulocyte-macrophage-CSF (GM-CSF); and granulocyte-CSF (G-CSF); interleukins (ILs) such as IL-1, IL-1a, IL-2, IL-3, IL-4, IL-5, IL-6, IL-7, IL-8, IL-9, IL-11, IL-12; a tumor necrosis factor such as TNF-α or TNF-β; and other polypeptide factors including LIF and kit ligand (KL). As used herein, the term cytokine includes proteins from natural sources or from recombinant cell culture and biologically active equivalents of the native sequence cytokines.

[0640] The term “package insert” is used to refer to instructions customarily included in commercial packages of therapeutic products, that contain information about the indications, usage, dosage, administration, contraindications and/or warnings concerning the use of such therapeutic products.

[0641] “Lymphoid tumor”, “lymphoid disease”, or the like includes, for example, B cell-associated cancers including, for example, high, intermediate and low grade lymphomas (including B cell lymphomas such as, for example, mucosa-associated-lymphoid tissue B cell lymphoma and non-Hodgkin's lymphoma, mantle cell lymphoma, Burkitt's lymphoma, marginal zone lymphoma, diffuse large cell lymphoma, follicular lymphoma, and Hodgkin's lymphoma) and leukemias (including chronic lymphocytic leukemia), multiple myeloma, and other hematological and/or B cell-associated cancers.

TABLE 2

| | | |
|---|---|---|
| TAT | XXXXXXXXXXXXXXX | (Length = 15 amino acids) |
| Comparison | XXXXXYYYYYYY | (Length = 12 amino acids) |
| Protein | | |

% amino acid sequence identity = (the number of identically matching amino acid residues between the two polypeptide sequences as determined by ALIGN-2) divided by (the total number of amino acid residues of the TAT polypeptide) = 5 divided by 15 = 33.3%

[0642] TABLE 3

| | | |
|---|---|---|
| TAT | XXXXXXXXXX | (Length = 10 amino acids) |
| Comparison | XXXXXYYYYYYZZYZ | (Length = 15 amino acids) |
| Protein | | |

% amino acid sequence identity = (the number of identically matching amino acid residues between the two polypeptide sequences as determined by ALIGN-2) divided by (the total number of amino acid residues of the TAT polypeptide) = 5 divided by 10 = 50%

[0643] TABLE 4

| | | |
|---|---|---|
| TAT-DNA | NNNNNNNNNNNNNN | (Length = 14 nucleotides) |
| Comparison | NNNNNNLLLLLLLLLL | (Length = 16 nucleotides) |
| DNA | | |

% nucleic acid sequence identity = (the number of identically matching nucleotides between the two nucleic acid sequences as determined by ALIGN-2) divided by (the total number of nucleotides of the TAT-DNA nucleic acid sequence) = 6 divided by 14 = 42.9%

[0644] TABLE 5

| | | |
|---|---|---|
| TAT-DNA | NNNNNNNNNNNN | (Length = 12 nucleotides) |
| Comparison | NNNNLLLVV | (Length = 9 nucleotides) |
| DNA | | |

% nucleic acid sequence identity = (the number of identically matching nucleotides between the two nucleic acid sequences as determined by ALIGN- 2) divided by (the total number of nucleotides of the TAT-DNA nucleic acid sequence) = 4 divided by 12 = 33.3%

[0645] II. Compositions and Methods of the Invention

[0646] A. Anti-TAT Antibodies

[0647] In one embodiment, the present invention provides anti-TAT antibodies which may find use herein as therapeutic and/or diagnostic agents. Exemplary antibodies include polyclonal, monoclonal, humanized, bispecific, and heteroconjugate antibodies.

[0648] 1. Polyclonal Antibodies

[0649] Polyclonal antibodies are preferably raised in animals by multiple subcutaneous (sc) or intraperitoneal (ip) injections of the relevant antigen and an adjuvant. It may be useful to conjugate the relevant antigen (especially when synthetic peptides are used) to a protein that is immunogenic in the species to be immunized. For example, the antigen can be conjugated to keyhole limpet hemocyanin (KLH), serum albumin, bovine thyroglobulin, or soybean trypsin inhibitor, using a bifunctional or derivatizing agent, e.g., maleimidobenzoyl sulfosuccinimide ester (conjugation through cysteine residues), N-hydroxysuccinimide (through lysine residues), glutaraldehyde, succinic anhydride, SOCl₂, or R¹N═C═NR, where R and R¹ are different alkyl groups.

[0650] Animals are immunized against the antigen, immunogenic conjugates, or derivatives by combining, e.g., 100 μg or 5 μg of the protein or conjugate (for rabbits or mice, respectively) with 3 volumes of Freund's complete adjuvant and injecting the solution intradermally at multiple sites. One month later, the animals are boosted with ⅕ to 1/10 the original amount of peptide or conjugate in Freund's complete adjuvant by subcutaneous injection at multiple sites. Seven to 14 days later, the animals are bled and the serum is assayed for antibody titer. Animals are boosted until the titer plateaus. Conjugates also can be made in recombinant cell culture as protein fusions. Also, aggregating agents such as alum are suitably used to enhance the immune response.

[0651] 2. Monoclonal Antibodies

[0652] Monoclonal antibodies may be made using the hybridoma method first described by Kohler et al., Nature, 256:495 (1975), or may be made by recombinant DNA methods (U.S. Pat. No. 4,816,567).

[0653] In the hybridoma method, a mouse or other appropriate host animal, such as a hamster, is immunized as described above to elicit lymphocytes that produce or are capable of producing antibodies that will specifically bind to the protein used for immunization. Alternatively, lymphocytes may be immunized in vitro. After immunization, lymphocytes are isolated and then fused with a myeloma cell line using a suitable fusing agent, such as polyethylene glycol, to form a hybridoma cell (Goding, Monoclonal Antibodies: Principles and Practice, pp.59-103 (Academic Press, 1986)).

[0654] The hybridoma cells thus prepared are seeded and grown in a suitable culture medium which medium preferably contains one or more substances that inhibit the growth or survival of the unfused, parental myeloma cells (also referred to as fusion partner). For example, if the parental myeloma cells lack the enzyme hypoxanthine guanine phosphoribosyl transferase (HGPRT or HPRT), the selective culture medium for the hybridomas typically will include hypoxanthine, aminopterin, and thymidine (HAT medium), which substances prevent the growth of HGPRT-deficient cells.

[0655] Preferred fusion partner myeloma cells are those that fuse efficiently, support stable high-level production of antibody by the selected antibody-producing cells, and are sensitive to a selective medium that selects against the unfused parental cells. Preferred myeloma cell lines are murine myeloma lines, such as those derived from MOPC-21 and MPC-11 mouse tumors available from the Salk Institute Cell Distribution Center, San Diego, Calif. USA, and SP-2 and derivatives e.g., X63-Ag8-653 cells available from the American Type Culture Collection, Manassas, Va., USA. Human myeloma and mouse-human heteromyeloma cell lines also have been described for the production of human monoclonal antibodies (Kozbor, J. Immunol., 133:3001 (1984); and Brodeur et al., Monoclonal Antibody Production Techniques and Applications, pp. 51-63 (Marcel Dekker, Inc., New York, 1987)).

[0656] Culture medium in which hybridoma cells are growing is assayed for production of monoclonal antibodies directed against the antigen. Preferably, the binding specificity of monoclonal antibodies produced by hybridoma cells is determined by immunoprecipitation or by an in vitro binding assay, such as radioimmunoassay (RIA) or enzyme-linked immunosorbent assay (ELISA).

[0657] The binding affinity of the monoclonal antibody can, for example, be determined by the Scatchard analysis described in Munson et al., Anal. Biochem., 107:220 (1980).

[0658] Once hybridoma cells that produce antibodies of the desired specificity, affinity, and/or activity are identified, the clones may be subcloned by limiting dilution procedures and grown by standard methods (Goding, Monoclonal Antibodies: Principles and Practice, pp.59-103 (Academic Press, 1986)). Suitable culture media for this purpose include, for example, D-MEM or RPMI-1640 medium. In addition, the hybridoma cells may be grown in vivo as ascites tumors in an animal e.g, by i.p. injection of the cells into mice.

[0659] The monoclonal antibodies secreted by the subclones are suitably separated from the culture medium, ascites fluid, or serum by conventional antibody purification procedures such as, for example, affinity chromatography (e.g., using protein A or protein G-Sepharose) or ion-exchange chromatography, hydroxylapatite chromatography, gel electrophoresis, dialysis, etc.

[0660] DNA encoding the monoclonal antibodies is readily isolated and sequenced using conventional procedures (e.g., by using oligonucleotide probes that are capable of binding specifically to genes encoding the heavy and light chains of murine antibodies). The hybridoma cells serve as a preferred source of such DNA. Once isolated, the DNA may be placed into expression vectors, which are then transfected into host cells such as E. coli cells, simian COS cells, Chinese Hamster Ovary (CHO) cells, or myeloma cells that do not otherwise produce antibody protein, to obtain the synthesis of monoclonal antibodies in the recombinant host cells. Review articles on recombinant expression in bacteria of DNA encoding the antibody include Skerra et al., Curr. Opinion in Immunol., 5:256-262 (1993) and Plückthun, Immunol. Revs. 130:151-188 (1992).

[0661] In a further embodiment, monoclonal antibodies or antibody fragments can be isolated from antibody phage libraries generated using the techniques described in McCafferty et al., Nature, 348:552-554 (1990). Clackson et al., Nature, 352:624-628 (1991) and Marks et al., J. Mol. Biol., 222:581-597 (1991) describe the isolation of murine and human antibodies, respectively, using phage libraries. Subsequent publications describe the production of high affinity (nM range) human antibodies by chain shuffling (Marks et al., Bio/Technology, 10:779-783 (1992)), as well as combinatorial infection and in vivo recombination as a strategy for constructing very large phage libraries (Waterhouse et al., Nuc. Acids. Res. 21:2265-2266 (1993)). Thus, these techniques are viable alternatives to traditional monoclonal antibody hybridoma techniques for isolation of monoclonal antibodies.

[0662] The DNA that encodes the antibody may be modified to produce chimeric or fusion antibody polypeptides, for example, by substituting human heavy chain and light chain constant domain (C_{H} and C_{L}) sequences for the homologous murine sequences (U.S. Pat. No. 4,816,567; and Morrison, et al., Proc. Natl. Acad. Sci. USA, 81:6851 (1984)), or by fusing the immunoglobulin coding sequence with all or part of the coding sequence for a non-immunoglobulin polypeptide (heterologous polypeptide). The non-immunoglobulin polypeptide sequences can substitute for the constant domains of an antibody, or they are substituted for the variable domains of one antigen-combining site of an antibody to create a chimeric bivalent antibody comprising one antigen-combining site having specificity for an antigen and another antigen-combining site having specificity for a different antigen.

[0663] 3. Human and Humanized Antibodies

[0664] The anti-TAT antibodies of the invention may further comprise humanized antibodies or human antibodies. Humanized forms of non-human (e.g., murine) antibodies are chimeric immunoglobulins, immunoglobulin chains or fragments thereof (such as Fv, Fab, Fab′, F(ab′)₂ or other antigen-binding subsequences of antibodies) which contain minimal sequence derived from non-human immunoglobulin. Humanized antibodies include human immunoglobulins (recipient antibody) in which residues from a complementary determining region (CDR) of the recipient are replaced by residues from a CDR of a non-human species (donor antibody) such as mouse, rat or rabbit having the desired specificity, affinity and capacity. In some instances, Fv framework residues of the human immunoglobulin are replaced by corresponding non-human residues. Humanized antibodies may also comprise residues which are found neither in the recipient antibody nor in the imported CDR or framework sequences. In general, the humanized antibody will comprise substantially all of at least one, and typically two, variable domains, in which all or substantially all of the CDR regions correspond to those of a non-human immunoglobulin and all or substantially all of the FR regions are those of a human immunoglobulin consensus sequence. The humanized antibody optimally also will comprise at least a portion of an immunoglobulin constant region (Fc), typically that of a human immunoglobulin [Jones et al., Nature, 321:522-525 (1986); Riechmann et al., Nature, 332:323-329 (1988); and Presta, Curr. Op. Struct. Biol., 2:593-596 (1992)].

[0665] Methods for humanizing non-human antibodies are well known in the art. Generally, a humanized antibody has one or more amino acid residues introduced into it from a source which is non-human. These non-human amino acid residues are often referred to as “import” residues, which are typically taken from an “import” variable domain. Humanization can be essentially performed following the method of Winter and co-workers [Jones et al., Nature, 321:522-525 (1986); Riechmann et al., Nature, 332:323-327 (1988); Verhoeyen et al., Science, 239:1534-1536 (1988)], by substituting rodent CDRs or CDR sequences for the corresponding sequences of a human antibody. Accordingly, such “humanized” antibodies are chimeric antibodies (U.S. Pat. No. 4,816,567), wherein substantially less than an intact human variable domain has been substituted by the corresponding sequence from a non-human species. In practice, humanized antibodies are typically human antibodies in which some CDR residues and possibly some FR residues are substituted by residues from analogous sites in rodent antibodies.

[0666] The choice of human variable domains, both light and heavy, to be used in making the humanized antibodies is very important to reduce antigenicity and HAMA response (human anti-mouse antibody) when the antibody is intended for human therapeutic use. According to the so-called “best-fit” method, the sequence of the variable domain of a rodent antibody is screened against the entire library of known human variable domain sequences. The human V domain sequence which is closest to that of the rodent is identified and the human framework region (FR) within it accepted for the humanized antibody (Sims et al., J. Immunol. 151:2296 (1993); Chothia et al., J. Mol. Biol., 196:901 (1987)). Another method uses a particular framework region derived from the consensus sequence of all human antibodies of a particular subgroup of light or heavy chains. The same framework may be used for several different humanized antibodies (Carter et al. Proc. Natl. Acad. Sci. USA, 89:4285 (1992); Presta et al., J. Immunol. 151:2623 (1993)).

[0667] It is further important that antibodies be humanized with retention of high binding affinity for the antigen and other favorable biological properties. To achieve this goal, according to a preferred method, humanized antibodies are prepared by a process of analysis of the parental sequences and various conceptual humanized products using three-dimensional models of the parental and humanized sequences. Three-dimensional immunoglobulin models are commonly available and are familiar to those skilled in the art. Computer programs are available which illustrate and display probable three-dimensional conformational structures of selected candidate immunoglobulin sequences. Inspection of these displays permits analysis of the likely role of the residues in the functioning of the candidate immunoglobulin sequence, i.e., the analysis of residues that influence the ability of the candidate immunoglobulin to bind its antigen. In this way, FR residues can be selected and combined from the recipient and import sequences so that the desired antibody characteristic, such as increased affinity for the target antigen(s), is achieved. In general, the hypervariable region residues are directly and most substantially involved in influencing antigen binding.

[0668] Various forms of a humanized anti-TAT antibody are contemplated. For example, the humanized antibody may be an antibody fragment, such as a Fab, which is optionally conjugated with one or more cytotoxic agent(s) in order to generate an immunoconjugate. Alternatively, the humanized antibody may be an intact antibody, such as an intact IgG1 antibody.

[0669] As an alternative to humanization, human antibodies can be generated. For example, it is now possible to produce transgenic animals (e.g., mice) that are capable, upon immunization, of producing a full repertoire of human antibodies in the absence of endogenous immunoglobulin production. For example, it has been described that the homozygous deletion of the antibody heavy-chain joining region (J_{H}) gene in chimeric and germ-line mutant mice results in complete inhibition of endogenous antibody production. Transfer of the human germ-line immunoglobulin gene array into such germ-line mutant mice will result in the production of human antibodies upon antigen challenge. See, e.g., Jakobovits et al., Proc. Natl. Acad. Sci. USA, 90:2551 (1993); Jakobovits et al., Nature, 362:255-258 (1993); Bruggemann et al., Year in Immuno. 7:33 (1993); U.S. Pat. Nos. 5,545,806, 5,569,825, 5,591,669 (all of GenPharm); U.S. Pat. No. 5,545,807; and WO 97/17852.

[0670] Alternatively, phage display technology (McCafferty et al., Nature 348:552-553 [1990]) can be used to produce human antibodies and antibody fragments in vitro, from immunoglobulin variable (V) domain gene repertoires from unimmunized donors. According to this technique, antibody V domain genes are cloned in-frame into either a major or minor coat protein gene of a filamentous bacteriophage, such as M13 or fd, and displayed as functional antibody fragments on the surface of the phage particle. Because the filamentous particle contains a single-stranded DNA copy of the phage genome, selections based on the functional properties of the antibody also result in selection of the gene encoding the antibody exhibiting those properties. Thus, the phage mimics some of the properties of the B-cell. Phage display can be performed in a variety of formats, reviewed in, e.g., Johnson, Kevin S. and Chiswell, David J., Current Opinion in Structural Biology 3:564-571 (1993). Several sources of V-gene segments can be used for phage display. Clackson et al., Nature, 352:624-628 (1991) isolated a diverse array of anti-oxazolone antibodies from a small random combinatorial library of V genes derived from the spleens of immunized mice. A repertoire of V genes from unimmunized human donors can be constructed and antibodies to a diverse array of antigens (including self-antigens) can be isolated essentially following the techniques described by Marks et al., J. Mol. Biol. 222:581-597 (1991), or Griffith et al., EMBO J. 12:725-734 (1993). See, also, U.S. Pat. Nos. 5,565,332 and 5,573,905.

[0671] As discussed above, human antibodies may also be generated by in vitro activated B cells (see U.S. Pat. Nos. 5,567,610 and 5,229,275).

[0672] 4. Antibody Fragments

[0673] In certain circumstances there are advantages of using antibody fragments, rather than whole antibodies. The smaller size of the fragments allows for rapid clearance, and may lead to improved access to solid tumors.

[0674] Various techniques have been developed for the production of antibody fragments. Traditionally, these fragments were derived via proteolytic digestion of intact antibodies (see, e.g., Morimoto et al., Journal of Biochemical and Biophysical Methods 24:107-117 (1992); and Brennan et al., Science, 229:81 (1985)). However, these fragments can now be produced directly by recombinant host cells. Fab, Fv and ScFv antibody fragments can all be expressed in and secreted from E. coli, thus allowing the facile production of large amounts of these fragments. Antibody fragments can be isolated from the antibody phage libraries discussed above. Alternatively, Fab′-SH fragments can be directly recovered from E. coli and chemically coupled to form F(ab′)₂ fragments (Carter et al., Bio/Technology 10:163-167 (1992)). According to another approach, F(ab′)₂ fragments can be isolated directly from recombinant host cell culture. Fab and F(ab′)₂ fragment with increased in vivo half-life comprising a salvage receptor binding epitope residues are described in U.S. Pat. No. 5,869,046. Other techniques for the production of antibody fragments will be apparent to the skilled practitioner. In other embodiments, the antibody of choice is a single chain Fv fragment (scFv). See WO 93/16185; U.S. Pat. No. 5,571,894; and U.S. Pat. No. 5,587,458. Fv and sFv are the only species with intact combining sites that are devoid of constant regions; thus, they are suitable for reduced nonspecific binding during in vivo use. sFv fusion proteins may be constructed to yield fusion of an effector protein at either the amino or the carboxy terminus of an sFv. See Antibody Engineering, ed. Borrebaeck, supra. The antibody fragment may also be a “linear antibody”, e.g., as described in U.S. Pat. No. 5,641,870 for example. Such linear antibody fragments may be monospecific or bispecific.

[0675] 5. Bispecific Antibodies

[0676] Bispecific antibodies are antibodies that have binding specificities for at least two different epitopes. Exemplary bispecific antibodies may bind to two different epitopes of a TAT protein as described herein. Other such antibodies may combine a TAT binding site with a binding site for another protein. Alternatively, an anti-TAT arm may be combined with an arm which binds to a triggering molecule on a leukocyte such as a T-cell receptor molecule (e.g. CD3), or Fc receptors for IgG (FcγR), such as FcγRI (CD64), FcγRII (CD32) and FcγRIII (CD16), so as to focus and localize cellular defense mechanisms to the TAT-expressing cell. Bispecific antibodies may also be used to localize cytotoxic agents to cells which express TAT. These antibodies possess a TAT-binding arm and an arm which binds the cytotoxic agent (e.g., saporin, anti-interferon-α, vinca alkaloid, ricin A chain, methotrexate or radioactive isotope hapten). Bispecific antibodies can be prepared as full length antibodies or antibody fragments (e.g., F(ab′)₂ bispecific antibodies).

[0677] WO 96/16673 describes a bispecific anti-ErbB2/anti-FcγRIII antibody and U.S. Pat. No. 5,837,234 discloses a bispecific anti-ErbB2/anti-FcγRI antibody. A bispecific anti-ErbB2/Fc α antibody is shown in WO98/02463. U.S. Pat. No. 5,821,337 teaches a bispecific anti-ErbB2/anti-CD3 antibody.

[0678] Methods for making bispecific antibodies are known in the art. Traditional production of full length bispecific antibodies is based on the co-expression of two immunoglobulin heavy chain-light chain pairs, where the two chains have different specificities (Millstein et al., Nature 305:537-539 (1983)). Because of the random assortment of immunoglobulin heavy and light chains, these hybridomas (quadromas) produce a potential mixture of 10 different antibody molecules, of which only one has the correct bispecific structure. Purification of the correct molecule, which is usually done by affinity chromatography steps, is rather cumbersome, and the product yields are low. Similar procedures are disclosed in WO 93/08829, and in Traunecker et al. EMBO J. 10:3655-3659 (1991).

[0679] According to a different approach, antibody variable domains with the desired binding specificities (antibody-antigen combining sites) are fused to immunoglobulin constant domain sequences. Preferably, the fusion is with an Ig heavy chain constant domain, comprising at least part of the hinge, C_{H}2, and C_{H}3 regions. It is preferred to have the first heavy-chain constant region (C_{H}1) containing the site necessary for light chain bonding, present in at least one of the fusions. DNAs encoding the immunoglobulin heavy chain fusions and, if desired, the immunoglobulin light chain, are inserted into separate expression vectors, and are co-transfected into a suitable host cell. This provides for greater flexibility in adjusting the mutual proportions of the three polypeptide fragments in embodiments when unequal ratios of the three polypeptide chains used in the construction provide the optimum yield of the desired bispecific antibody. It is, however, possible to insert the coding sequences for two or all three polypeptide chains into a single expression vector when the expression of at least two polypeptide chains in equal ratios results in high yields or when the ratios have no significant affect on the yield of the desired chain combination.

[0680] In a preferred embodiment of this approach, the bispecific antibodies are composed of a hybrid immunoglobulin heavy chain with a first binding specificity in one arm, and a hybrid immunoglobulin heavy chain-light chain pair (providing a second binding specificity) in the other arm. It was found that this asymmetric structure facilitates the separation of the desired bispecific compound from unwanted immunoglobulin chain combinations, as the presence of an immunoglobulin light chain in only one half of the bispecific molecule provides for a facile way of separation. This approach is disclosed in WO 94/04690. For further details of generating bispecific antibodies see, for example, Suresh et al., Methods in Enzmmology 121:210 (1986).

[0681] According to another approach described in U.S. Pat. No. 5,731,168, the interface between a pair of antibody molecules can be engineered to maximize the percentage of heterodimers which are recovered from recombinant cell culture. The preferred interface comprises at least a part of the C_{H}3 domain. In this method, one or more small amino acid side chains from the interface of the first antibody molecule are replaced with larger side chains (e.g., tyrosine or tryptophan). Compensatory “cavities” of identical or similar size to the large side chain(s) are created on the interface of the second antibody molecule by replacing large amino acid side chains with smaller ones (e.g., alanine or threonine). This provides a mechanism for increasing the yield of the heterodimer over other unwanted end-products such as homodimers.

[0682] Bispecific antibodies include cross-linked or “heteroconjugate” antibodies. For example, one of the antibodies in the heteroconjugate can be coupled to avidin, the other to biotin. Such antibodies have, for example, been proposed to target immune system cells to unwanted cells (U.S. Pat. No. 4,676,980), and for treatment of HIV infection (WO 91/00360, WO 92/200373, and EP 03089). Heteroconjugate antibodies may be made using any convenient cross-linking methods. Suitable cross-linking agents are well known in the art, and are disclosed in U.S. Pat. No. 4,676,980, along with a number of cross-linking techniques.

[0683] Techniques for generating bispecific antibodies from antibody fragments have also been described in the literature. For example, bispecific antibodies can be prepared using chemical linkage. Brennan et al., Science 229:81 (1985) describe a procedure wherein intact antibodies are proteolytically cleaved to generate F(ab′)₂ fragments. These fragments are reduced in the presence of the dithiol complexing agent, sodium arsenite, to stabilize vicinal dithiols and prevent intermolecular disulfide formation. The Fab′ fragments generated are then converted to thionitrobenzoate (TNB) derivatives. One of the Fab′-TNB derivatives is then reconverted to the Fab′-thiol by reduction with mercaptoethylamine and is mixed with an equimolar amount of the other Fab′-TNB derivative to form the bispecific antibody. The bispecific antibodies produced can be used as agents for the selective immobilization of enzymes.

[0684] Recent progress has facilitated the direct recovery of Fab′-SH fragments from E. coli, which can be chemically coupled to form bispecific antibodies. Shalaby et al., J. Exp. Med. 175: 217-225 (1992) describe the production of a fully humanized bispecific antibody F(ab′)₂ molecule. Each Fab′ fragment was separately secreted from E. coli and subjected to directed chemical coupling in vitro to form the bispecific antibody. The bispecific antibody thus formed was able to bind to cells overexpressing the ErbB2 receptor and normal human T cells, as well as trigger the lytic activity of human cytotoxic lymphocytes against human breast tumor targets.

[0685] Various techniques for making and isolating bispecific antibody fragments directly from recombinant cell culture have also been described. For example, bispecific antibodies have been produced using leucine zippers. Kostelny et al. J. Immunol. 148(5):1547-1553 (1992). The leucine zipper peptides from the Fos and Jun proteins were linked to the Fab′ portions of two different antibodies by gene fusion. The antibody homodimers were reduced at the hinge region to form monomers and then re-oxidized to form the antibody heterodimers. This method can also be utilized for the production of antibody homodimers. The “diabody” technology described by Hollinger et al., Proc. Natl. Acad. Sci. USA 90:6444-6448 (1993) has provided an alternative mechanism for making bispecific antibody fragments. The fragments comprise a V_{H} connected to a V_{L} by a linker which is too short to allow pairing between the two domains on the same chain. Accordingly, the V_{H} and V_{L} domains of one fragment are forced to pair with the complementary V_{L} and V_{H} domains of another fragment, thereby forming two antigen-binding sites. Another strategy for making bispecific antibody fragments by the use of single-chain Fv (sFv) dimers has also been reported. See Gruber et al., J. Immunol., 152:5368 (1994).

[0686] Antibodies with more than two valencies are contemplated. For example, trispecific antibodies can be prepared. Tutt et al., J. Immunol. 147:60 (1991).

[0687] 6. Heteroconjugate Antibodies

[0688] Heteroconjugate antibodies are also within the scope of the present invention. Heteroconjugate antibodies are composed of two covalently joined antibodies. Such antibodies have, for example, been proposed to target immune system cells to unwanted cells [U.S. Pat. No. 4,676,980], and for treatment of HIV infection [WO 91/00360; WO 92/200373; EP 03089]. It is contemplated that the antibodies may be prepared in vitro using known methods in synthetic protein chemistry, including those involving crosslinking agents. For example, immunotoxins may be constructed using a disulfide exchange reaction or by forming a thioether bond. Examples of suitable reagents for this purpose include iminothiolate and methyl-4-mercaptobutyrimidate and those disclosed, for example, in U.S. Pat. No. 4,676,980.

[0689] 7. Multivalent Antibodies

[0690] A multivalent antibody may be internalized (and/or catabolized) faster than a bivalent antibody by a cell expressing an antigen to which the antibodies bind. The antibodies of the present invention can be multivalent antibodies (which are other than of the IgM class) with three or more antigen binding sites (e.g. tetravalent antibodies), which can be readily produced by recombinant expression of nucleic acid encoding the polypeptide chains of the antibody. The multivalent antibody can comprise a dimerization domain and three or more antigen binding sites. The preferred dimerization domain comprises (or consists of) an Fc region or a hinge region. In this scenario, the antibody will comprise an Fc region and three or more antigen binding sites amino-terminal to the Fc region. The preferred multivalent antibody herein comprises (or consists of) three to about eight, but preferably four, antigen binding sites. The multivalent antibody comprises at least one polypeptide chain (and preferably two polypeptide chains), wherein the polypeptide chain(s) comprise two or more variable domains. For instance, the polypeptide chain(s) may comprise VD1-(X1)ₙ-VD2-(X2)ₙ—Fc, wherein VD1 is a first variable domain, VD2 is a second variable domain, Fc is one polypeptide chain of an Fc region, X1 and X2 represent an amino acid or polypeptide, and n is 0 or 1. For instance, the polypeptide chain(s) may comprise: VH-CH1-flexible linker-VH-CH1-Fc region chain; or VH-CH1-VH-CH1-Fc region chain. The multivalent antibody herein preferably further comprises at least two (and preferably four) light chain variable domain polypeptides. The multivalent antibody herein may, for instance, comprise from about two to about eight light chain variable domain polypeptides. The light chain variable domain polypeptides contemplated here comprise a light chain variable domain and, optionally, further comprise a CL domain.

[0691] 8. Effector Function Engineering

[0692] It may be desirable to modify the antibody of the invention with respect to effector function, e.g., so as to enhance antigen-dependent cell-mediated cyotoxicity (ADCC) and/or complement dependent cytotoxicity (CDC) of the antibody. This may be achieved by introducing one or more amino acid substitutions in an Fc region of the antibody. Alternatively or additionally, cysteine residue(s) may be introduced in the Fc region, thereby allowing interchain disulfide bond formation in this region. The homodimeric antibody thus generated may have improved internalization capability and/or increased complement-mediated cell killing and antibody-dependent cellular cytotoxicity (ADCC). See Caron et al., J. Exp Med. 176:1191-1195 (1992) and Shopes, B. J. Immunol. 148:2918-2922 (1992). Homodimeric antibodies with enhanced anti-tumor activity may also be prepared using heterobifunctional cross-linkers as described in Wolff et al., Cancer Research 53:2560-2565 (1993). Alternatively, an antibody can be engineered which has dual Fc regions and may thereby have enhanced complement lysis and ADCC capabilities. See Stevenson et al. Anti-Cancer Drug Design 3:219-230 (1989). To increase the serum half life of the antibody, one may incorporate a salvage receptor binding epitope into the antibody (especially an antibody fragment) as described in U.S. Pat. No. 5,739,277, for example. As used herein, the term “salvage receptor binding epitope” refers to an epitope of the Fc region of an IgG molecule (e.g., IgG₁, IgG₂, IgG₃, or IgG₄) that is responsible for increasing the in vivo serum half-life of the IgG molecule.

[0693] 9. Immunoconjugates

[0694] The invention also pertains to immunoconjugates comprising an antibody conjugated to a cytotoxic agent such as a chemotherapeutic agent, a growth inhibitory agent, a toxin (e.g., an enzymatically active toxin of bacterial, fungal, plant, or animal origin, or fragments thereof), or a radioactive isotope (i.e., a radioconjugate).

[0695] Chemotherapeutic agents useful in the generation of such immunoconjugates have been described above. Enzymatically active toxins and fragments thereof that can be used include diphtheria A chain, nonbinding active fragments of diphtheria toxin, exotoxin A chain (from Pseudomonas aeruginosa), ricin A chain, abrin A chain, modeccin A chain, alpha-sarcin, Aleurites fordii proteins, dianthin proteins, Phytolaca americana proteins (PAPI, PAPII, and PAP-S), momordica charantia inhibitor, curcin, crotin, sapaonaria officinalis inhibitor, gelonin, mitogellin, restrictocin, phenomycin, enomycin, and the tricothecenes. A variety of radionuclides are available for the production of radioconjugated antibodies. Examples include ²¹²Bi, ¹³¹I, ¹³¹In, ⁹⁰Y, and ¹⁸⁶Re. Conjugates of the antibody and cytotoxic agent are made using a variety of bifunctional protein-coupling agents such as N-succinimidyl-3-(2-pyridyldithiol)propionate (SPDP), iminothiolane (IT), bifunctional derivatives of imidoesters (such as dimethyl adipimidate HCL), active esters (such as disuccinimidyl suberate), aldehydes (such as glutareldehyde), bis-azido compounds (such as bis(p-azidobenzoyl) hexanediamine), bis-diazonium derivatives (such as bis-(p-diazoniumbenzoyl)-ethylenediamine), diisocyanates (such as tolyene 2,6-diisocyanate), and bis-active fluorine compounds (such as 1,5-difluoro-2,4-dinitrobenzene). For example, a ricin immunotoxin can be prepared as described in Vitetta et al., Science, 238: 1098 (1987). Carbon-14-labeled 1-isothiocyanatobenzyl-3-methyldiethylene triaminepentaacetic acid (MX-DTPA) is an exemplary chelating agent for conjugation of radionucleotide to the antibody. See WO94/11026.

[0696] Conjugates of an antibody and one or more small molecule toxins, such as a calicheamicin, maytansinoids, a trichothene, and CC1065, and the derivatives of these toxins that have toxin activity, are also contemplated herein.

[0697] Maytansine and Maytansinoids

[0698] In one preferred embodiment, an anti-TAT antibody (full length or fragments) of the invention is conjugated to one or more maytansinoid molecules.

[0699] Maytansinoids are mitototic inhibitors which act by inhibiting tubulin polymerization. Maytansine was first isolated from the east African shrub Maytenus serrata (U.S. Pat. No. 3,896,111). Subsequently, it was discovered that certain microbes also produce maytansinoids, such as maytansinol and C-3 maytansinol esters (U.S. Pat. No. 4,151,042). Synthetic maytansinol and derivatives and analogues thereof are disclosed, for example, in U.S. Pat. Nos. 4,137,230; 4,248,870; 4,256,746; 4,260,608; 4,265,814; 4,294,757; 4,307,016; 4,308,268; 4,308,269; 4,309,428; 4,313,946; 4,315,929; 4,317,821; 4,322,348; 4,331,598; 4,361,650; 4,364,866; 4,424,219; 4,450,254; 4,362,663; and 4,371,533, the disclosures of which are hereby expressly incorporated by reference.

[0700] Maytansinoid-Antibody Conjugates

[0701] In an attempt to improve their therapeutic index, maytansine and maytansinoids have been conjugated to antibodies specifically binding to tumor cell antigens. Immunoconjugates containing maytansinoids and their therapeutic use are disclosed, for example, in U.S. Pat. Nos. 5,208,020, 5,416,064 and European Patent EP 0425 235 B1, the disclosures of which are hereby expressly incorporated by reference. Liu et al., Proc. Natl. Acad. Sci. USA 93:8618-8623(1996) described immunoconjugates comprising a maytansinoid designated DM1 linked to the monoclonal antibody C242 directed against human colorectal cancer. The conjugate was found to be highly cytotoxic towards cultured colon cancer cells, and showed antitumor activity in an in vivo tumor growth assay. Chari et al., Cancer Research 52:127-131 (1992) describe immunoconjugates in which a maytansinoid was conjugated via a disulfide linker to the murine antibody A7 binding to an antigen on human colon cancer cell lines, or to another murine monoclonal antibody TA. 1 that binds the HER-2/neu oncogene.

[0702] The cytotoxicity of the TA.1-maytansonoid conjugate was tested in vitro on the human breast cancer cell line SK-BR-3, which expresses 3×10⁵ HER-2 surface antigens per cell. The drug conjugate achieved a degree of cytotoxicity similar to the free maytansonid drug, which could be increased by increasing the number of maytansinoid molecules per antibody molecule. The A7-maytansinoid conjugate showed low systemic cytotoxicity in mice.

[0703] Anti-TAT Polypeptide Antibody-Maytansinoid Conjugates (Immunoconjugates)

[0704] Anti-TAT antibody-maytansinoid conjugates are prepared by chemically linking an anti-TAT antibody to a maytansinoid molecule without significantly diminishing the biological activity of either the antibody or the maytansinoid molecule. An average of 3-4 maytansinoid molecules conjugated per antibody molecule has shown efficacy in enhancing cytotoxicity of target cells without negatively affecting the function or solubility of the antibody, although even one molecule of toxin/antibody would be expected to enhance cytotoxicity over the use of naked antibody. Maytansinoids are well known in the art and can be synthesized by known techniques or isolated from natural sources. Suitable maytansinoids are disclosed, for example, in U.S. Pat. No. 5,208,020 and in the other patents and nonpatent publications referred to hereinabove. Preferred maytansinoids are maytansinol and maytansinol analogues modified in the aromatic ring or at other positions of the maytansinol molecule, such as various maytansinol esters.

[0705] There are many linking groups known in the art for making antibody-maytansinoid conjugates, including, for example, those disclosed in U.S. Pat. No. 5,208,020 or EP Patent 0 425 235 B1, and Chari et al., Cancer Research 52:127-131 (1992). The linking groups include disufide groups, thioether groups, acid labile groups, photolabile groups, peptidase labile groups, or esterase labile groups, as disclosed in the above-identified patents, disulfide and thioether groups being preferred.

[0706] Conjugates of the antibody and maytansinoid may be made using a variety of bifunctional protein coupling agents such as N-succinimidyl-3-(2-pyridyldithio)propionate (SPDP), succinimidyl-4-(N-maleimidomethyl) cyclohexane-1-carboxylate, iminothiolane (IT), bifunctional derivatives of imidoesters (such as dimethyl adipimidate HCL), active esters (such as disuccinimidyl suberate), aldehydes (such as glutareldehyde), bis-azido compounds (such as bis(p-azidobenzoyl)hexanediamine), bis-diazonium derivatives (such as bis-(p-diazoniumbenzoyl)-ethylenediamine), diisocyanates (such as toluene 2,6-diisocyanate), and bis-active fluorine compounds (such as 1,5-difluoro-2,4-dinitrobenzene). Particularly preferred coupling agents include N-succinimidyl-3-(2-pyridyldithio)propionate (SPDP) (Carlsson et al., Biochem. J. 173:723-737 [1978]) and N-succinimidyl-4-(2-pyridylthio)pentanoate (SPP) to provide for a disulfide linkage.

[0707] The linker may be attached to the maytansinoid molecule at various positions, depending on the type of the link. For example, an ester linkage may be formed by reaction with a hydroxyl group using conventional coupling techniques. The reaction may occur at the C-3 position having a hydroxyl group, the C-14 position modified with hyrdoxymethyl, the C-15 position modified with a hydroxyl group, and the C-20 position having a hydroxyl group. In a preferred embodiment, the linkage is formed at the C-3 position of maytansinol or a maytansinol analogue.

[0708] Calicheamicin

[0709] Another immunoconjugate of interest comprises an anti-TAT antibody conjugated to one or more calicheamicin molecules. The calicheamicin family of antibiotics are capable of producing double-stranded DNA breaks at sub-picomolar concentrations. For the preparation of conjugates of the calicheamicin family, see U.S. Pat. Nos. 5,712,374, 5,714,586, 5,739,116, 5,767,285, 5,770,701, 5,770,710, 5,773,001, 5,877,296 (all to American Cyanamid Company). Structural analogues of calicheamicin which may be used include, but are not limited to, γ₁^{I}, α₂^{I}, α₃^{I}, N-acetyl-γ₁^{I}, PSAG and θ^{I}₁ (Hinman et al., Cancer Research 53:3336-3342 (1993), Lode et al., Cancer Research 58:2925-2928 (1998) and the aforementioned U.S. patents to American Cyanamid). Another anti-tumor drug that the antibody can be conjugated is QFA which is an antifolate. Both calicheamicin and QFA have intracellular sites of action and do not readily cross the plasma membrane. Therefore, cellular uptake of these agents through antibody mediated internalization greatly enhances their cytotoxic effects.

[0710] Other Cytotoxic Agents

[0711] Other antitumor agents that can be conjugated to the anti-TAT antibodies of the invention include BCNU, streptozoicin, vincristine and 5-fluorouracil, the family of agents known collectively LL-E33288 complex described in U.S. Pat. Nos. 5,053,394, 5,770,710, as well as esperamicins (U.S. Pat. No. 5,877,296).

[0712] Enzymatically active toxins and fragments thereof which can be used include diphtheria A chain, nonbinding active fragments of diphtheria toxin, exotoxin A chain (from Pseudomonas aeruginosa), ricin A chain, abrin A chain, modeccin A chain, alpha-sarcin, Aleurites fordii proteins, dianthin proteins, Phytolaca americana proteins (PAPI, PAPII, and PAP-S), momordica charantia inhibitor, curcin, crotin, sapaonaria officinalis inhibitor, gelonin, mitogellin, restrictocin, phenomycin, enomycin and the tricothecenes. See, for example, WO 93/21232 published Oct. 28, 1993.

[0713] The present invention further contemplates an immunoconjugate formed between an antibody and a compound with nucleolytic activity (e.g., a ribonuclease or a DNA endonuclease such as a deoxyribonuclease; DNase).

[0714] For selective destruction of the tumor, the antibody may comprise a highly radioactive atom. A variety of radioactive isotopes are available for the production of radioconjugated anti-TAT antibodies. Examples include At²¹¹, I¹³¹, I¹²⁵, Y⁹⁰, Re¹⁸⁶, Re¹⁸⁸, Sm¹⁵³, Bi²¹², P³², Pb²¹² and radioactive isotopes of Lu. When the conjugate is used for diagnosis, it may comprise a radioactive atom for scintigraphic studies, for example tc^{99m} or I¹²³, or a spin label for nuclear magnetic resonance (NMR) imaging (also known as magnetic resonance imaging, mri), such as iodine-123 again, iodine-131, indium-111, fluorine-19, carbon-13, nitrogen-15, oxygen-17, gadolinium, manganese or iron.

[0715] The radio- or other labels may be incorporated in the conjugate in known ways. For example, the peptide may be biosynthesized or may be synthesized by chemical amino acid synthesis using suitable amino acid precursors involving, for example, fluorine-19 in place of hydrogen. Labels such as tc^{99m} or I¹²³, Re¹⁸⁶, Re¹⁸⁸ and In¹¹¹ can be attached via a cysteine residue in the peptide. Yttrium-90 can be attached via a lysine residue. The IODOGEN method (Fraker et al (1978) Biochem. Biophys. Res. Commun. 80: 49-57 can be used to incorporate iodine-123. “Monoclonal Antibodies in Immunoscintigraphy” (Chatal,CRC Press 1989) describes other methods in detail.

[0716] Conjugates of the antibody and cytotoxic agent may be made using a variety of bifunctional protein coupling agents such as N-succinimidyl-3-(2-pyridyldithio)propionate (SPDP), succinimidyl-4-(N-maleimidomethyl) cyclohexane-1-carboxylate, iminothiolane (IT), bifunctional derivatives of imidoesters (such as dimethyl adipimidate HCL), active esters (such as disuccinimidyl suberate), aldehydes (such as glutareldehyde), bis-azido compounds (such as bis(p-azidobenzoyl)hexanediamine), bis-diazonium derivatives (such as bis-(p-diazoniumbenzoyl)-ethylenediamine), diisocyanates (such as tolyene 2,6-diisocyanate), and bis-active fluorine compounds (such as 1,5-difluoro-2,4-dinitrobenzene). For example, a ricin immunotoxin can be prepared as described in Vitetta et al., Science 238:1098(1987). Carbon-14-labeled 1-isothiocyanatobenzyl-3-methyldiethylene triaminepentaacetic acid (MX-DTPA) is an exemplary chelating agent for conjugation of radionucleotide to the antibody. See WO94/11026. The linker may be a “cleavable linker” facilitating release of the cytotoxic drug in the cell. For example, an acid-labile linker, peptidase-sensitive linker, photolabile linker, dimethyl linker or disulfide-containing linker (Chari et al., Cancer Research 52:127-131 (1992); U.S. Pat. No. 5,208,020) may be used.

[0717] Alternatively, a fusion protein comprising the anti-TAT antibody and cytotoxic agent may be made, e.g., by recombinant techniques or peptide synthesis. The length of DNA may comprise respective regions encoding the two portions of the conjugate either adjacent one another or separated by a region encoding a linker peptide which does not destroy the desired properties of the conjugate.

[0718] In yet another embodiment, the antibody may be conjugated to a “receptor” (such streptavidin) for utilization in tumor pre-targeting wherein the antibody-receptor conjugate is administered to the patient, followed by removal of unbound conjugate from the circulation using a clearing agent and then administration of a “ligand” (e.g., avidin) which is conjugated to a cytotoxic agent (e.g., a radionucleotide).

[0719] 10. Immunoliposomes

[0720] The anti-TAT antibodies disclosed herein may also be formulated as immunoliposomes. A “liposome” is a small vesicle composed of various types of lipids, phospholipids and/or surfactant which is useful for delivery of a drug to a mammal. The components of the liposome are commonly arranged in a bilayer formation, similar to the lipid arrangement of biological membranes. Liposomes containing the antibody are prepared by methods known in the art, such as described in Epstein et al., Proc. Natl. Acad. Sci. USA 82:3688 (1985); Hwang et al., Proc. Natl Acad. Sci. USA77:4030 (1980); U.S. Pat. Nos. 4,485,045 and 4,544,545; and WO97/38731 published Oct. 23, 1997. Liposomes with enhanced circulation time are disclosed in U.S. Pat. No. 5,013,556.

[0721] Particularly useful liposomes can be generated by the reverse phase evaporation method with a lipid composition comprising phosphatidylcholine, cholesterol and PEG-derivatized phosphatidylethanolamine (PEG-PE). Liposomes are extruded through filters of defined pore size to yield liposomes with the desired diameter. Fab′ fragments of the antibody of the present invention can be conjugated to the liposomes as described in Martin et al., J. Biol. Chem. 257:286-288 (1982) via a disulfide interchange reaction. A chemotherapeutic agent is optionally contained within the liposome. See Gabizon et al., J. National Cancer Inst. 81(19): 1484 (1989).

[0722] B. TAT Binding Oligopeptides

[0723] TAT binding oligopeptides of the present invention are oligopeptides that bind, preferably specifically, to a TAT polypeptide as described herein. TAT binding oligopeptides may be chemically synthesized using known oligopeptide synthesis methodology or may be prepared and purified using recombinant technology. TAT binding oligopeptides are usually at least about 5 amino acids in length, alternatively at least about 6, 7, 8, 9, 10, 11, 12, 13, 14, 15, 16, 17, 18, 19, 20, 21, 22, 23, 24, 25, 26, 27, 28, 29, 30, 31, 32, 33, 34, 35, 36, 37, 38, 39, 40, 41, 42, 43, 44, 45, 46, 47, 48, 49, 50, 51, 52, 53, 54, 55, 56, 57, 58, 59, 60, 61, 62, 63, 64, 65, 66, 67, 68, 69, 70, 71, 72, 73, 74, 75, 76, 77, 78, 79, 80, 81, 82, 83, 84, 85, 86, 87, 88, 89, 90, 91, 92, 93, 94, 95, 96, 97, 98, 99, or 100 amino acids in length or more, wherein such oligopeptides that are capable of binding, preferably specifically, to a TAT polypeptide as described herein. TAT binding oligopeptides may be identified without undue experimentation using well known techniques. In this regard, it is noted that techniques for screening oligopeptide libraries for oligopeptides that are capable of specifically binding to a polypeptide target are well known in the art (see, e.g., U.S. Pat. Nos. 5,556,762, 5,750,373, 4,708,871, 4,833,092, 5,223,409, 5,403,484, 5,571,689, 5,663,143; PCT Publication Nos. WO 84/03506 and WO84/03564; Geysen et al., Proc. Natl. Acad. Sci. U.S.A., 81:3998-4002 (1984); Geysen et al., Proc. Natl. Acad. Sci. U.S.A., 82:178-182 (1985); Geysen et al., in Synthetic Peptides as Antigens, 130-149 (1986); Geysen et al., J. Immunol. Meth., 102:259-274 (1987); Schoofs et al., J. Immunol., 140:611-616 (1988), Cwirla, S. E. et al. (1990) Proc. Natl. Acad. Sci. USA, 87:6378; Lowman, H. B. et al. (1991) Biochemistry, 30:10832; Clackson, T. et al. (1991) Nature, 352: 624; Marks, J. D. et al. (1991), J. Mol. Biol., 222:581; Kang, A. S. et al. (1991) Proc. Natl. Acad. Sci. USA, 88:8363, and Smith, G. P. (1991) Current Opin. Biotechnol., 2:668).

[0724] In this regard, bacteriophage (phage) display is one well known technique which allows one to screen large oligopeptide libraries to identify member(s) of those libraries which are capable of specifically binding to a polypeptide target. Phage display is a technique by which variant polypeptides are displayed as fusion proteins to the coat protein on the surface of bacteriophage particles (Scott, J. K. and Smith, G. P. (1990) Science 249: 386). The utility of phage display lies in the fact that large libraries of selectively randomized protein variants (or randomly cloned cDNAs) can be rapidly and efficiently sorted for those sequences that bind to a target molecule with high affinity. Display of peptide (Cwirla, S. E. et al. (1990) Proc. Natl. Acad. Sci. USA, 87:6378) or protein (Lowman, H. B. et al. (1991) Biochemistry, 30:10832; Clackson, T. et al. (1991) Nature, 352: 624; Marks, J. D. et al. (1991), J. Mol. Biol., 222:581; Kang, A. S. et al. (1991) Proc. Natl. Acad. Sci. USA, 88:8363) libraries on phage have been used for screening millions of polypeptides or oligopeptides for ones with specific binding properties (Smith, G. P. (1991) Current Opin. Biotechnol., 2:668). Sorting phage libraries of random mutants requires a strategy for constructing and propagating a large number of variants, a procedure for affinity purification using the target receptor, and a means of evaluating the results of binding enrichments. U.S. Pat. Nos. 5,223,409, 5,403,484, 5,571,689, and 5,663,143.

[0725] Although most phage display methods have used filamentous phage, lambdoid phage display systems (WO 95/34683; U.S. Pat. No. 5,627,024), T4 phage display systems (Ren et al., Gene, 215: 439 (1998); Zhu et al., Cancer Research, 58(15): 3209-3214 (1998); Jiang et al., Infection & Immunity, 65(11): 4770-4777 (1997); Ren et al., Gene, 195(2):303-311 (1997); Ren, Protein Sci., 5: 1833 (1996); Efimov et al., Virus Genes, 10: 173 (1995)) and T7 phage display systems (Smith and Scott, Methods in Enzymology, 217: 228-257 (1993); U.S. Pat. No. 5,766,905) are also known.

[0726] Many other improvements and variations of the basic phage display concept have now been developed. These improvements enhance the ability of display systems to screen peptide libraries for binding to selected target molecules and to display functional proteins with the potential of screening these proteins for desired properties. Combinatorial reaction devices for phage display reactions have been developed (WO 98/14277) and phage display libraries have been used to analyze and control bimolecular interactions (WO 98/20169; WO 98/20159) and properties of constrained helical peptides (WO 98/20036). WO 97/35196 describes a method of isolating an affinity ligand in which a phage display library is contacted with one solution in which the ligand will bind to a target molecule and a second solution in which the affinity ligand will not bind to the target molecule, to selectively isolate binding ligands. WO 97/46251 describes a method of biopanning a random phage display library with an affinity purified antibody and then isolating binding phage, followed by a micropanning process using microplate wells to isolate high affinity binding phage. The use of Staphlylococcus aureus protein A as an affinity tag has also been reported (Li et al. (1998) Mol Biotech., 9:187). WO 97/47314 describes the use of substrate subtraction libraries to distinguish enzyme specificities using a combinatorial library which may be a phage display library. A method for selecting enzymes suitable for use in detergents using phage display is described in WO 97/09446. Additional methods of selecting specific binding proteins are described in U.S. Pat. Nos. 5,498,538, 5,432,018, and WO 98/15833.

[0727] Methods of generating peptide libraries and screening these libraries are also disclosed in U.S. Pat. Nos. 5,723,286, 5,432,018, 5,580,717, 5,427,908, 5,498,530, 5,770,434, 5,734,018, 5,698,426, 5,763,192, and 5,723,323.

[0728] C. TAT Binding Organic Molecules

[0729] TAT binding organic molecules are organic molecules other than oligopeptides or antibodies as defined herein that bind, preferably specifically, to a TAT polypeptide as described herein. TAT binding organic molecules may be identified and chemically synthesized using known methodology (see, e.g., PCT Publication Nos. WO00/00823 and WO00/39585). TAT binding organic molecules are usually less than about 2000 daltons in size, alternatively less than about 1500, 750, 500, 250 or 200 daltons in size, wherein such organic molecules that are capable of binding, preferably specifically, to a TAT polypeptide as described herein may be identified without undue experimentation using well known techniques. In this regard, it is noted that techniques for screening organic molecule libraries for molecules that are capable of binding to a polypeptide target are well known in the art (see, e.g., PCT Publication Nos. WO00/00823 and WO00/39585). TAT binding organic molecules may be, for example, aldehydes, ketones, oximes, hydrazones, semicarbazones, carbazides, primary amines, secondary amines, tertiary amines, N-substituted hydrazines, hydrazides, alcohols, ethers, thiols, thioethers, disulfides, carboxylic acids, esters, amides, ureas, carbamates, carbonates, ketals, thioketals, acetals, thioacetals, aryl halides, aryl sulfonates, alkyl halides, alkyl sulfonates, aromatic compounds, heterocyclic compounds, anilines, alkenes, alkynes, diols, amino alcohols, oxazolidines, oxazolines, thiazolidines, thiazolines, enamines, sulfonamides, epoxides, aziridines, isocyanates, sulfonyl chlorides, diazo compounds, acid chlorides, or the like.

[0730] D. Screening for Anti-TAT Antibodies. TAT Binding Oligopeptides and TAT Binding Organic Molecules With the Desired Properties

[0731] Techniques for generating antibodies, oligopeptides and organic molecules that bind to TAT polypeptides have been described above. One may further select antibodies, oligopeptides or other organic molecules with certain biological characteristics, as desired.

[0732] The growth inhibitory effects of an anti-TAT antibody, oligopeptide or other organic molecule of the invention may be assessed by methods known in the art, e.g., using cells which express a TAT polypeptide either endogenously or following transfection with the TAT gene. For example, appropriate tumor cell lines and TAT-transfected cells may treated with an anti-TAT monoclonal antibody, oligopeptide or other organic molecule of the invention at various concentrations for a few days (e.g., 2-7) days and stained with crystal violet or MTT or analyzed by some other calorimetric assay. Another method of measuring proliferation would be by comparing ³H-thymidine uptake by the cells treated in the presence or absence an anti-TAT antibody, TAT binding oligopeptide or TAT binding organic molecule of the invention. After treatment, the cells are harvested and the amount of radioactivity incorporated into the DNA quantitated in a scintillation counter. Appropriate positive controls include treatment of a selected cell line with a growth inhibitory antibody known to inhibit growth of that cell line. Growth inhibition of tumor cells in vivo can be determined in various ways known in the art. Preferably, the tumor cell is one that overexpresses a TAT polypeptide. Preferably, the anti-TAT antibody, TAT binding oligopeptide or TAT binding organic molecule will inhibit cell proliferation of a TAT-expressing tumor cell in vitro or in vivo by about 25-100% compared to the untreated tumor cell, more preferably, by about 30-100%, and even more preferably by about 50-100% or 70-100%, in one embodiment, at an antibody concentration of about 0.5 to 30 μg/ml. Growth inhibition can be measured at an antibody concentration of about 0.5 to 30 μg/ml or about 0.5 nM to 200 nM in cell culture, where the growth inhibition is determined 1-10 days after exposure of the tumor cells to the antibody. The antibody is growth inhibitory in vivo if administration of the anti-TAT antibody at about 1 μg/kg to about 100 mg/kg body weight results in reduction in tumor size or reduction of tumor cell proliferation within about 5 days to 3 months from the first administration of the antibody, preferably within about 5 to 30 days.

[0733] To select for an anti-TAT antibody, TAT binding oligopeptide or TAT binding organic molecule which induces cell death, loss of membrane integrity as indicated by, e.g., propidium iodide (PI), trypan blue or 7AAD uptake may be assessed relative to control. A PI uptake assay can be performed in the absence of complement and immune effector cells. TAT polypeptide-expressing tumor cells are incubated with medium alone or medium containing the appropriate anti-TAT antibody (e.g, at about 10 μg/ml), TAT binding oligopeptide or TAT binding organic molecule. The cells are incubated for a 3 day time period. Following each treatment, cells are washed and aliquoted into 35 mm strainer-capped 12×75 tubes (1 ml per tube, 3 tubes per treatment group) for removal of cell clumps. Tubes then receive PI (10 μg/ml). Samples may be analyzed using a FACSCAN® flow cytometer and FACSCONVERT® CellQuest software (Becton Dickinson). Those anti-TAT antibodies, TAT binding oligopeptides or TAT binding organic molecules that induce statistically significant levels of cell death as determined by PI uptake may be selected as cell death-inducing anti-TAT antibodies, TAT binding oligopeptides or TAT binding organic molecules.

[0734] To screen for antibodies, oligopeptides or other organic molecules which bind to an epitope on a TAT polypeptide bound by an antibody of interest, a routine cross-blocking assay such as that described in Antibodies, A Laboratory Manual, Cold Spring Harbor Laboratory, Ed Harlow and David Lane (1988), can be performed. This assay can be used to determine if a test antibody, oligopeptide or other organic molecule binds the same site or epitope as a known anti-TAT antibody. Alternatively, or additionally, epitope mapping can be performed by methods known in the art. For example, the antibody sequence can be mutagenized such as by alanine scanning, to identify contact residues. The mutant antibody is initailly tested for binding with polyclonal antibody to ensure proper folding. In a different method, peptides corresponding to different regions of a TAT polypeptide can be used in competition assays with the test antibodies or with a test antibody and an antibody with a characterized or known epitope.

[0735] E. Antibody Dependent Enzyme Mediated Prodrug Therapy (ADEPT)

[0736] The antibodies of the present invention may also be used in ADEPT by conjugating the antibody to a prodrug-activating enzyme which converts a prodrug (e.g., a peptidyl chemotherapeutic agent, see WO81/01145) to an active anti-cancer drug. See, for example, WO 88/07378 and U.S. Pat. No. 4,975,278.

[0737] The enzyme component of the immunoconjugate useful for ADEPT includes any enzyme capable of acting on a prodrug in such a way so as to covert it into its more active, cytotoxic form.

[0738] Enzymes that are useful in the method of this invention include, but are not limited to, alkaline phosphatase useful for converting phosphate-containing prodrugs into free drugs; arylsulfatase useful for converting sulfate-containing prodrugs into free drugs; cytosine deaminase useful for converting non-toxic 5-fluorocytosine into the anti-cancer drug, 5-fluorouracil; proteases, such as serratia protease, thermolysin, subtilisin, carboxypeptidases and cathepsins (such as cathepsins B and L), that are useful for converting peptide-containing prodrugs into free drugs; D-alanylcarboxypeptidases, useful for converting prodrugs that contain D-amino acid substituents; carbohydrate-cleaving enzymes such as β-galactosidase and neuramimidase useful for converting glycosylated prodrugs into free drugs; β-lactamase useful for converting drugs derivatized with β-lactams into free drugs; and penicillin amidases, such as penicillin V amidase or penicillin G amidase, useful for converting drugs derivatized at their amine nitrogens with phenoxyacetyl or phenylacetyl groups, respectively, into free drugs. Alternatively, antibodies with enzymatic activity, also known in the art as “abzymes”, can be used to convert the prodrugs of the invention into free active drugs (see, e.g., Massey, Nature 328:457-458 (1987)). Antibody-abzyme conjugates can be prepared as described herein for delivery of the abzyme to a tumor cell population.

[0739] The enzymes of this invention can be covalently bound to the anti-TAT antibodies by techniques well known in the art such as the use of the heterobifunctional crosslinking reagents discussed above. Alternatively, fusion proteins comprising at least the antigen binding region of an antibody of the invention linked to at least a functionally active portion of an enzyme of the invention can be constructed using recombinant DNA techniques well known in the art (see, e.g., Neuberger et al., Nature 312:604-608 (1984).

[0740] F. Full-Length TAT Polypeptides

[0741] The present invention also provides newly identified and isolated nucleotide sequences encoding polypeptides referred to in the present application as TAT polypeptides. In particular, cDNAs (partial and full-length) encoding various TAT polypeptides have been identified and isolated, as disclosed in further detail in the Examples below.

[0742] As disclosed in the Examples below, various cDNA clones have been deposited with the ATCC. The actual nucleotide sequences of those clones can readily be determined by the skilled artisan by sequencing of the deposited clone using routine methods in the art. The predicted amino acid sequence can be determined from the nucleotide sequence using routine skill. For the TAT polypeptides and encoding nucleic acids described herein, in some cases, Applicants have identified what is believed to be the reading frame best identifiable with the sequence information available at the time.

[0743] G. Anti-TAT Antibody and TAT Polypeptide Variants

[0744] In addition to the anti-TAT antibodies and full-length native sequence TAT polypeptides described herein, it is contemplated that anti-TAT antibody and TAT polypeptide variants can be prepared. Anti-TAT antibody and TAT polypeptide variants can be prepared by introducing appropriate nucleotide changes into the encoding DNA, and/or by synthesis of the desired antibody or polypeptide. Those skilled in the art will appreciate that amino acid changes may alter post-translational processes of the anti-TAT antibody or TAT polypeptide, such as changing the number or position of glycosylation sites or altering the membrane anchoring characteristics.

[0745] Variations in the anti-TAT antibodies and TAT polypeptides described herein, can be made, for example, using any of the techniques and guidelines for conservative and non-conservative mutations set forth, for instance, in U.S. Pat. No. 5,364,934. Variations may be a substitution, deletion or insertion of one or more codons encoding the antibody or polypeptide that results in a change in the amino acid sequence as compared with the native sequence antibody or polypeptide. Optionally the variation is by substitution of at least one amino acid with any other amino acid in one or more of the domains of the anti-TAT antibody or TAT polypeptide. Guidance in determining which amino acid residue may be inserted, substituted or deleted without adversely affecting the desired activity may be found by comparing the sequence of the anti-TAT antibody or TAT polypeptide with that of homologous known protein molecules and minimizing the number of amino acid sequence changes made in regions of high homology. Amino acid substitutions can be the result of replacing one amino acid with another amino acid having similar structural and/or chemical properties, such as the replacement of a leucine with a serine, i.e., conservative amino acid replacements. Insertions or deletions may optionally be in the range of about 1 to 5 amino acids. The variation allowed may be determined by systematically making insertions, deletions or substitutions of amino acids in the sequence and testing the resulting variants for activity exhibited by the full-length or mature native sequence.

[0746] Anti-TAT antibody and TAT polypeptide fragments are provided herein. Such fragments may be truncated at the N-terminus or C-terminus, or may lack internal residues, for example, when compared with a full length native antibody or protein. Certain fragments lack amino acid residues that are not essential for a desired biological activity of the anti-TAT antibody or TAT polypeptide.

[0747] Anti-TAT antibody and TAT polypeptide fragments may be prepared by any of a number of conventional techniques. Desired peptide fragments may be chemically synthesized. An alternative approach involves generating antibody or polypeptide fragments by enzymatic digestion, e.g., by treating the protein with an enzyme known to cleave proteins at sites defined by particular amino acid residues, or by digesting the DNA with suitable restriction enzymes and isolating the desired fragment. Yet another suitable technique involves isolating and amplifying a DNA fragment encoding a desired antibody or polypeptide fragment, by polymerase chain reaction (PCR). Oligonucleotides that define the desired termini of the DNA fragment are employed at the 5′ and 3′ primers in the PCR. Preferably, anti-TAT antibody and TAT polypeptide fragments share at least one biological and/or immunological activity with the native anti-TAT antibody or TAT polypeptide disclosed herein.

[0748] In particular embodiments, conservative substitutions of interest are shown in Table 6 under the heading of preferred substitutions. If such substitutions result in a change in biological activity, then more substantial changes, denominated exemplary substitutions in Table 6, or as further described below in reference to amino acid classes, are introduced and the products screened.

TABLE 6

| Original | Exemplary | Preferred |
|---|---|---|
| Residue | Substitutions | Substitutions |
| Ala (A) | val; leu; ile | val |
| Arg (R) | lys; gln; asn | lys |
| Asn (N) | gln; his; lys; arg | gln |
| Asp (D) | glu | glu |
| Cys (C) | ser | ser |
| Gln (Q) | asn | asn |
| Glu (E) | asp | asp |
| Gly (G) | pro; ala | ala |
| His (H) | asn; gln; lys; arg | arg |
| Ile (I) | leu; val; met; ala; phe; | leu |
| | norleucine | |
| Leu (L) | norleucine; ile; val; | ile |
| | met; ala; phe | |
| Lys (K) | arg; gln; asn | arg |
| Met (M) | leu; phe; ile | leu |
| Phe (F) | leu; val; ile; ala; tyr | leu |
| Pro (P) | ala | ala |
| Ser (S) | thr | thr |
| Thr (T) | ser | ser |
| Trp (W) | tyr; phe | tyr |
| Tyr (Y) | trp; phe; thr; ser | phe |
| Val (V) | ile; leu; met; phe; | |
| | ala; norleucine | leu |

[0749] Substantial modifications in function or immunological identity of the anti-TAT antibody or TAT polypeptide are accomplished by selecting substitutions that differ significantly in their effect on maintaining (a) the structure of the polypeptide backbone in the area of the substitution, for example, as a sheet or helical conformation, (b) the charge or hydrophobicity of the molecule at the target site, or (c) the bulk of the side chain. Naturally occurring residues are divided into groups based on common side-chain properties:

[0750] (1) hydrophobic: norleucine, met, ala, val, leu, ile;

[0751] (2) neutral hydrophilic: cys, ser, thr;

[0752] (3) acidic: asp, glu;

[0753] (4) basic: asn, gln, his, lys, arg;

[0754] (5) residues that influence chain orientation: gly, pro; and

[0755] (6) aromatic: trp, tyr, phe.

[0756] Non-conservative substitutions will entail exchanging a member of one of these classes for another class. Such substituted residues also may be introduced into the conservative substitution sites or, more preferably, into the remaining (non-conserved) sites.

[0757] The variations can be made using methods known in the art such as oligonucleotide-mediated (site-directed) mutagenesis, alanine scanning, and PCR mutagenesis. Site-directed mutagenesis [Carter et al. Nucl. Acids Res., 13:4331 (1986); Zoller et al., Nucl. Acids Res., 10:6487 (1987)], cassette mutagenesis [Wells et al., Gene, 34:315 (1985)], restriction selection mutagenesis [Wells et al., Philos. Trans. R. Soc. London SerA, 317:415 (1986)] or other known techniques can be performed on the cloned DNA to produce the anti-TAT antibody or TAT polypeptide variant DNA.

[0758] Scanning amino acid analysis can also be employed to identify one or more amino acids along a contiguous sequence. Among the preferred scanning amino acids are relatively small, neutral amino acids. Such amino acids include alanine, glycine, serine, and cysteine. Alanine is typically a preferred scanning amino acid among this group because it eliminates the side-chain beyond the beta-carbon and is less likely to alter the main-chain conformation of the variant [Cunningham and Wells, Science, 244:1081-1085 (1989)]. Alanine is also typically preferred because it is the most common amino acid. Further, it is frequently found in both buried and exposed positions [Creighton, The Proteins, (W.H. Freeman & Co., N.Y.); Chothia, J. Mol. Biol., 150:1 (1976)]. If alanine substitution does not yield adequate amounts of variant, an isoteric amino acid can be used.

[0759] Any cysteine residue not involved in maintaining the proper conformation of the anti-TAT antibody or TAT polypeptide also may be substituted, generally with serine, to improve the oxidative stability of the molecule and prevent aberrant crosslinking. Conversely, cysteine bond(s) may be added to the anti-TAT antibody or TAT polypeptide to improve its stability (particularly where the antibody is an antibody fragment such as an Fv fragment).

[0760] A particularly preferred type of substitutional variant involves substituting one or more hypervariable region residues of a parent antibody (e.g., a humanized or human antibody). Generally, the resulting variant(s) selected for further development will have improved biological properties relative to the parent antibody from which they are generated. A convenient way for generating such substitutional variants involves affinity maturation using phage display. Briefly, several hypervariable region sites (e.g., 6-7 sites) are mutated to generate all possible amino substitutions at each site. The antibody variants thus generated are displayed in a monovalent fashion from filamentous phage particles as fusions to the gene III product of M13 packaged within each particle. The phage-displayed variants are then screened for their biological activity (e.g., binding affinity) as herein disclosed. In order to identify candidate hypervariable region sites for modification, alanine scanning mutagenesis can be performed to identify hypervariable region residues contributing significantly to antigen binding. Alternatively, or additionally, it may be beneficial to analyze a crystal structure of the antigen-antibody complex to identify contact points between the antibody and human TAT polypeptide. Such contact residues and neighboring residues are candidates for substitution according to the techniques elaborated herein. Once such variants are generated, the panel of variants is subjected to screening as described herein and antibodies with superior properties in one or more relevant assays may be selected for further development.

[0761] Nucleic acid molecules encoding amino acid sequence variants of the anti-TAT antibody are prepared by a variety of methods known in the art. These methods include, but are not limited to, isolation from a natural source (in the case of naturally occurring amino acid sequence variants) or preparation by oligonucleotide-mediated (or site-directed) mutagenesis, PCR mutagenesis, and cassette mutagenesis of an earlier prepared variant or a non-variant version of the anti-TAT antibody.

[0762] H. Modifications of Anti-TAT Antibodies and TAT Polypeptides

[0763] Covalent modifications of anti-TAT antibodies and TAT polypeptides are included within the scope of this invention. One type of covalent modification includes reacting targeted amino acid residues of an anti-TAT antibody or TAT polypeptide with an organic derivatizing agent that is capable of reacting with selected side chains or the N- or C-terminal residues of the anti-TAT antibody or TAT polypeptide. Derivatization with bifunctional agents is useful, for instance, for crosslinking anti-TAT antibody or TAT polypeptide to a water-insoluble support matrix or surface for use in the method for purifying anti-TAT antibodies, and vice-versa. Commonly used crosslinking agents include, e.g., 1,1-bis(diazoacetyl)-2-phenylethane, glutaraldehyde, N-hydroxysuccinimide esters, for example, esters with 4-azidosalicylic acid, homobifunctional imidoesters, including disuccinimidyl esters such as 3,3′-dithiobis(succinimidylpropionate), bifunctional maleimides such as bis-N-maleimido-1,8-octane and agents such as methyl-3-[(p-azidophenyl)dithio]propioimidate.

[0764] Other modifications include deamidation of glutaminyl and asparaginyl residues to the corresponding glutamyl and aspartyl residues, respectively, hydroxylation of proline and lysine, phosphorylation of hydroxyl groups of seryl or threonyl residues, methylation of the α-amino groups of lysine, arginine, and histidine side chains [T. E. Creighton, Proteins: Structure and Molecular Properties, W.H. Freeman & Co., San Francisco, pp. 79-86 (1983)], acetylation of the N-terminal amine, and amidation of any C-terminal carboxyl group.

[0765] Another type of covalent modification of the anti-TAT antibody or TAT polypeptide included within the scope of this invention comprises altering the native glycosylation pattern of the antibody or polypeptide. “Altering the native glycosylation pattern” is intended for purposes herein to mean deleting one or more carbohydrate moieties found in native sequence anti-TAT antibody or TAT polypeptide (either by removing the underlying glycosylation site or by deleting the glycosylation by chemical and/or enzymatic means), and/or adding one or more glycosylation sites that are not present in the native sequence anti-TAT antibody or TAT polypeptide. In addition, the phrase includes qualitative changes in the glycosylation of the native proteins, involving a change in the nature and proportions of the various carbohydrate moieties present.

[0766] Glycosylation of antibodies and other polypeptides is typically either N-linked or O-linked. N-linked refers to the attachment of the carbohydrate moiety to the side chain of an asparagine residue. The tripeptide sequences asparagine-X-serine and asparagine-X-threonine, where X is any amino acid except proline, are the recognition sequences for enzymatic attachment of the carbohydrate moiety to the asparagine side chain. Thus, the presence of either of these tripeptide sequences in a polypeptide creates a potential glycosylation site. O-linked glycosylation refers to the attachment of one of the sugars N-aceylgalactosamine, galactose, or xylose to a hydroxyamino acid, most commonly serine or threonine, although 5-hydroxyproline or 5-hydroxylysine may also be used.

[0767] Addition of glycosylation sites to the anti-TAT antibody or TAT polypeptide is conveniently accomplished by altering the amino acid sequence such that it contains one or more of the above-described tripeptide sequences (for N-linked glycosylation sites). The alteration may also be made by the addition of, or substitution by, one or more serine or threonine residues to the sequence of the original anti-TAT antibody or TAT polypeptide (for O-linked glycosylation sites). The anti-TAT antibody or TAT polypeptide amino acid sequence may optionally be altered through changes at the DNA level, particularly by mutating the DNA encoding the anti-TAT antibody or TAT polypeptide at preselected bases such that codons are generated that will translate into the desired amino acids.

[0768] Another means of increasing the number of carbohydrate moieties on the anti-TAT antibody or TAT polypeptide is by chemical or enzymatic coupling of glycosides to the polypeptide. Such methods are described in the art, e.g., in WO 87/05330 published 11 Sep. 1987, and in Aplin and Wriston, CRC Crit. Rev. Biochem., pp. 259-306 (1981).

[0769] Removal of carbohydrate moieties present on the anti-TAT antibody or TAT polypeptide may be accomplished chemically or enzymatically or by mutational substitution of codons encoding for amino acid residues that serve as targets for glycosylation. Chemical deglycosylation techniques are known in the art and described, for instance, by Hakimuddin, et al., Arch. Biochem. Biophys., 259:52 (1987) and by Edge et al., Anal. Biochem., 118:131 (1981). Enzymatic cleavage of carbohydrate moieties on polypeptides can be achieved by the use of a variety of endo- and exo-glycosidases as described by Thotakura et al., Meth. Enzymol., 138:350 (1987).

[0770] Another type of covalent modification of anti-TAT antibody or TAT polypeptide comprises linking the antibody or polypeptide to one of a variety of nonproteinaceous polymers, e.g., polyethylene glycol (PEG), polypropylene glycol, or polyoxyalkylenes, in the manner set forth in U.S. Pat. Nos. 4,640,835; 4,496,689; 4,301,144; 4,670,417; 4,791,192 or 4,179,337. The antibody or polypeptide also may be entrapped in microcapsules prepared, for example, by coacervation techniques or by interfacial polymerization (for example, hydroxymethylcellulose or gelatin-microcapsules and poly-(methylmethacylate) microcapsules, respectively), in colloidal drug delivery systems (for example, liposomes, albumin microspheres, microemulsions, nano-particles and nanocapsules), or in macroemulsions. Such techniques are disclosed in Remington's Pharmaceutical Sciences, 16th edition, Oslo, A., Ed., (1980).

[0771] The anti-TAT antibody or TAT polypeptide of the present invention may also be modified in a way to form chimeric molecules comprising an anti-TAT antibody or TAT polypeptide fused to another, heterologous polypeptide or amino acid sequence.

[0772] In one embodiment, such a chimeric molecule comprises a fusion of the anti-TAT antibody or TAT polypeptide with a tag polypeptide which provides an epitope to which an anti-tag antibody can selectively bind. The epitope tag is generally placed at the amino- or carboxyl-terminus of the anti-TAT antibody or TAT polypeptide. The presence of such epitope-tagged forms of the anti-TAT antibody or TAT polypeptide can be detected using an antibody against the tag polypeptide. Also, provision of the epitope tag enables the anti-TAT antibody or TAT polypeptide to be readily purified by affinity purification using an anti-tag antibody or another type of affinity matrix that binds to the epitope tag. Various tag polypeptides and their respective antibodies are well known in the art. Examples include poly-histidine (poly-his) or poly-histidine-glycine (poly-his-gly) tags; the flu HA tag polypeptide and its antibody 12CA5 [Field et al., Mol. Cell. Biol., 8:2159-2165 (1988)]; the c-myc tag and the 8F9, 3C7, 6E10, G4, B7 and 9E10 antibodies thereto [Evan et al., Molecular and Cellular Biology, 5:3610-3616 (1985)]; and the Herpes Simplex virus glycoprotein D (gD) tag and its antibody [Paborsky et al., Protein Engineering, 3(6):547-553 (1990)]. Other tag polypeptides include the Flag-peptide [Hopp et al., BioTechnology, 6:1204-1210 (1988)); the KT3 epitope peptide [Martin et al., Science, 255:192-194 (1992)]; an α-tubulin epitope peptide [Skinner et al., J. Biol. Chem., 266:15163-15166 (1991)]; and the T7 gene 10 protein peptide tag [Lutz-Freyermuth et al., Proc. Natl. Acad. Sci. USA, 87:6393-6397 (1990)].

[0773] In an alternative embodiment, the chimeric molecule may comprise a fusion of the anti-TAT antibody or TAT polypeptide with an immunoglobulin or a particular region of an immunoglobulin. For a bivalent form of the chimeric molecule (also referred to as an “immunoadhesin”), such a fusion could be to the Fc region of an IgG molecule. The Ig fusions preferably include the substitution of a soluble (transmembrane domain deleted or inactivated) form of an anti-TAT antibody or TAT polypeptide in place of at least one variable region within an Ig molecule. In a particularly preferred embodiment, the immunoglobulin fusion includes the hinge, CH₂ and CH₃, or the hinge, CH₁, CH₂ and CH₃ regions of an IgG1 molecule. For the production of immunoglobulin fusions see also U.S. Pat. No. 5,428,130 issued Jun. 27, 1995.

[0774] I. Preparation of Anti-TAT Antibodies and TAT Polypeptides

[0775] The description below relates primarily to production of anti-TAT antibodies and TAT polypeptides by culturing cells transformed or transfected with a vector containing anti-TAT antibody- and TAT polypeptide-encoding nucleic acid. It is, of course, contemplated that alternative methods, which are well known in the art, may be employed to prepare anti-TAT antibodies and TAT polypeptides. For instance, the appropriate amino acid sequence, or portions thereof, may be produced by direct peptide synthesis using solid-phase techniques [see, e.g., Stewart et al., Solid-Phase Peptide Synthesis, W.H. Freeman Co., San Francisco, Calif. (1969); Merrifield, J. Am. Chem. Soc., 85:2149-2154 (1963)]. In vitro protein synthesis may be performed using manual techniques or by automation. Automated synthesis may be accomplished, for instance, using an Applied Biosystems Peptide Synthesizer (Foster City, Calif.) using manufacturer's instructions. Various portions of the anti-TAT antibody or TAT polypeptide may be chemically synthesized separately and combined using chemical or enzymatic methods to produce the desired anti-TAT antibody or TAT polypeptide.

[0776] 1. Isolation of DNA Encoding Anti-TAT Antibody or TAT Polypeptide

[0777] DNA encoding anti-TAT antibody or TAT polypeptide may be obtained from a cDNA library prepared from tissue believed to possess the anti-TAT antibody or TAT polypeptide mRNA and to express it at a detectable level. Accordingly, human anti-TAT antibody or TAT polypeptide DNA can be conveniently obtained from a cDNA library prepared from human tissue. The anti-TAT antibody- or TAT polypeptide-encoding gene may also be obtained from a genomic library or by known synthetic procedures (e.g., automated nucleic acid synthesis).

[0778] Libraries can be screened with probes (such as oligonucleotides of at least about 20-80 bases) designed to identify the gene of interest or the protein encoded by it. Screening the cDNA or genomic library with the selected probe may be conducted using standard procedures, such as described in Sambrook et al., Molecular Cloning: A Laboratory Manual (New York: Cold Spring Harbor Laboratory Press, 1989). An alternative means to isolate the gene encoding anti-TAT antibody or TAT polypeptide is to use PCR methodology [Sambrook et al., supra; Dieffenbach et al., PCR Primer: A Laboratory Manual (Cold Spring Harbor Laboratory Press, 1995)].

[0779] Techniques for screening a cDNA library are well known in the art. The oligonucleotide sequences selected as probes should be of sufficient length and sufficiently unambiguous that false positives are minimized. The oligonucleotide is preferably labeled such that it can be detected upon hybridization to DNA in the library being screened. Methods of labeling are well known in the art, and include the use of radiolabels like ³²P-labeled ATP, biotinylation or enzyme labeling. Hybridization conditions, including moderate stringency and high stringency, are provided in Sambrook et al., supra.

[0780] Sequences identified in such library screening methods can be compared and aligned to other known sequences deposited and available in public databases such as GenBank or other private sequence databases. Sequence identity (at either the amino acid or nucleotide level) within defined regions of the molecule or across the full-length sequence can be determined using methods known in the art and as described herein.

[0781] Nucleic acid having protein coding sequence may be obtained by screening selected cDNA or genomic libraries using the deduced amino acid sequence disclosed herein for the first time, and, if necessary, using conventional primer extension procedures as described in Sambrook et al., supra, to detect precursors and processing intermediates of mRNA that may not have been reverse-transcribed into cDNA.

[0782] 2. Selection and Transformation of Host Cells

[0783] Host cells are transfected or transformed with expression or cloning vectors described herein for anti-TAT antibody or TAT polypeptide production and cultured in conventional nutrient media modified as appropriate for inducing promoters, selecting transformants, or amplifying the genes encoding the desired sequences. The culture conditions, such as media, temperature, pH and the like, can be selected by the skilled artisan without undue experimentation. In general, principles, protocols, and practical techniques for maximizing the productivity of cell cultures can be found in Mammalian Cell Biotechnology: a Practical Approach, M. Butler, ed. (IRL Press, 1991) and Sambrook et al., supra.

[0784] Methods of eukaryotic cell transfection and prokaryotic cell transformation are known to the ordinarily skilled artisan, for example, CaCl₂, CaPO₄, liposome-mediated and electroporation. Depending on the host cell used, transformation is performed using standard techniques appropriate to such cells. The calcium treatment employing calcium chloride, as described in Sambrook et al., supra, or electroporation is generally used for prokaryotes. Infection with Agrobacterium tumefaciens is used for transformation of certain plant cells, as described by Shaw et al., Gene, 23:315 (1983) and WO 89/05859 published 29 Jun. 1989. For mammalian cells without such cell walls, the calcium phosphate precipitation method of Graham and van der Eb, Virology, 52:456-457 (1978) can be employed. General aspects of mammalian cell host system transfections have been described in U.S. Pat. No. 4,399,216. Transformations into yeast are typically carried out according to the method of Van Solingen et al., J. Bact., 130:946 (1977) and Hsiao et al., Proc. Natl. Acad. Sci. (USA), 76:3829 (1979). However, other methods for introducing DNA into cells, such as by nuclear microinjection, electroporation, bacterial protoplast fusion with intact cells, or polycations, e.g., polybrene, polyornithine, may also be used. For various techniques for transforming mammalian cells, see Keown et al., Methods in Enzymology, 185:527-537 (1990) and Mansour et al., Nature, 336:348-352 (1988).

[0785] Suitable host cells for cloning or expressing the DNA in the vectors herein include prokaryote, yeast, or higher eukaryote cells. Suitable prokaryotes include but are not limited to eubacteria, such as Gram-negative or Gram-positive organisms, for example, Enterobacteriaceae such as E. coli. Various E. coli strains are publicly available, such as E. coli K12 strain MM294 (ATCC 31,446); E. coli X1776 (ATCC 31,537); E. coli strain W3110 (ATCC 27,325) and K5772 (ATCC 53,635). Other suitable prokaryotic host cells include Enterobacteriaceae such as Escherichia, e.g., E. coli, Enterobacter, Erwinia, Klebsiella, Proteus, Salmonella, e.g., Salmonella typhimurium, Serratia, e.g., Serratia marcescans, and Shigella, as well as Bacilli such as B. subtilis and B. licheniformis (e.g., B. licheniformis 41P disclosed in DD 266,710 published 12 Apr. 1989), Pseudomonas such as P. aeruginosa, and Streptomyces. These examples are illustrative rather than limiting. Strain W3110 is one particularly preferred host or parent host because it is a common host strain for recombinant DNA product fermentations. Preferably, the host cell secretes minimal amounts of proteolytic enzymes. For example, strain W3110 may be modified to effect a genetic mutation in the genes encoding proteins endogenous to the host, with examples of such hosts including E. coli W3110 strain 1A2, which has the complete genotype tonA; E. coli W3110 strain 9E4, which has the complete genotype tonA ptr3; E. coli W3110 strain 27C7 (ATCC 55,244), which has the complete genotype tonA ptr3 phoA E15 (argF-lac)169 degP ompT kan^{r}; E. coli W3110 strain 37D6, which has the complete genotype tonA ptr3 phoA E15 (argf-lac)169 degP ompT rbs7 ilvG kah; E. coli W3110 strain 40B4, which is strain 37D6 with a non-kanamycin resistant degP deletion mutation; and an E. coli strain having mutant periplasmic protease disclosed in U.S. Pat. No. 4,946,783 issued 7 Aug. 1990. Alternatively, in vitro methods of cloning, e.g., PCR or other nucleic acid polymerase reactions, are suitable.

[0786] Full length antibody, antibody fragments, and antibody fusion proteins can be produced in bacteria, in particular when glycosylation and Fc effector function are not needed, such as when the therapeutic antibody is conjugated to a cytotoxic agent (e.g., a toxin) and the immunoconjugate by itself shows effectiveness in tumor cell destruction. Full length antibodies have greater half life in circulation. Production in E. coli is faster and more cost efficient. For expression of antibody fragments and polypeptides in bacteria, see, e.g., U.S. Pat. No. 5,648,237 (Carter et. al.), U.S. Pat. No. 5,789,199 (Joly et al.), and U.S. Pat. No. 5,840,523 (Simmons et al.) which describes translation initiation regio (TIR) and signal sequences for optimizing expression and secretion, these patents incorporated herein by reference. After expression, the antibody is isolated from the E. coli cell paste in a soluble fraction and can be purified through, e.g., a protein A or G column depending on the isotype. Final purification can be carried out similar to the process for purifying antibody expressed e.g, in CHO cells.

[0787] In addition to prokaryotes, eukaryotic microbes such as filamentous fungi or yeast are suitable cloning or expression hosts for anti-TAT antibody- or TAT polypeptide-encoding vectors. Saccharomyces cerevisiae is a commonly used lower eukaryotic host microorganism. Others include Schizosaccharomyces pombe (Beach and Nurse, Nature, 290: 140 [1981]; EP 139,383 published 2 May 1985); Kluyveromyces hosts (U.S. Pat. No. 4,943,529; Fleer et al., Bio/Technology, 9:968-975 (1991)) such as, e.g., K. lactis (MW98-8C, CBS683, CBS4574; Louvencourt et al., J. Bacteriol., 154(2):737-742 [1983]), K. fragilis (ATCC 12,424), K. bulgaricus (ATCC 16,045), K. wickeramii (ATCC 24,178), K. waltii (ATCC 56,500), K. drosophilarum (ATCC 36,906; Van den Berg et al., Bio/Technology, 8:135 (1990)), K. thermotolerans, and K. marxianus; yarrowia (EP 402,226); Pichia pastoris (EP 183,070; Sreekrishna et al., J. Basic Microbiol., 28:265-278 [1988]); Candida; Trichoderma reesia (EP 244,234); Neurospora crassa (Case et al., Proc. Natl. Acad. Sci. USA, 76:5259-5263 [1979]); Schwanniomyces such as Schwanniomyces occidentalis (EP 394,538 published 31 Oct. 1990); and filamentous fungi such as, e.g., Neurospora, Penicillium, Tolypocladium (WO 91/00357 published 10 Jan. 1991), and Aspergillus hosts such as A. nidulans (Ballance et al., Biochem. Biophys. Res. Commun., 112:284-289 [1983]; Tilburn et al., Gene, 26:205-221 [1983]; Yelton et al., Proc. Natl. Acad. Sci. USA, 81: 1470-1474 [1984]) and A. niger (Kelly and Hynes, EMBO J., 4:475-479 [1985]). Methylotropic yeasts are suitable herein and include, but are not limited to, yeast capable of growth on methanol selected from the genera consisting of Hansenula, Candida, Kloeckera, Pichia, Saccharomyces, Torulopsis, and Rhodotorula. A list of specific species that are exemplary of this class of yeasts may be found in C. Anthony, The Biochemistry of Methylotrophs, 269 (1982).

[0788] Suitable host cells for the expression of glycosylated anti-TAT antibody or TAT polypeptide are derived from multicellular organisms. Examples of invertebrate cells include insect cells such as Drosophila S2 and Spodoptera Sf9, as well as plant cells, such as cell cultures of cotton, corn, potato, soybean, petunia, tomato, and tobacco. Numerous baculoviral strains and variants and corresponding permissive insect host cells from hosts such as Spodoptera frugiperda (caterpillar), Aedes aegypti (mosquito), Aedes albopictus (mosquito), Drosophila melanogaster (fruitfly), and Bombyx mori have been identified. A variety of viral strains for transfection are publicly available, e.g., the L-1 variant of Autographa californica NPV and the Bm-5 strain of Bombyx mori NPV, and such viruses may be used as the virus herein according to the present invention, particularly for transfection of Spodoptera frugiperda cells.

[0789] However, interest has been greatest in vertebrate cells, and propagation of vertebrate cells in culture (tissue culture) has become a routine procedure. Examples of useful mammalian host cell lines are monkey kidney CV1 line transformed by SV40 (COS-7, ATCC CRL 1651); human embryonic kidney line (293 or 293 cells subcloned for growth in suspension culture, Graham et al., J. Gen Virol. 36:59 (1977)); baby hamster kidney cells (BHK, ATCC CCL 10); Chinese hamster ovary cells/-DHFR(CHO, Urlaub et al., Proc. Natl. Acad. Sci. USA 77:4216 (1980)); mouse sertoli cells (TM4, Mather, Biol. Reprod. 23:243-251 (1980)); monkey kidney cells (CV1 ATCC CCL 70); African green monkey kidney cells (VERO-76, ATCC CRL-1587); human cervical carcinoma cells (HELA, ATCC CCL 2); canine kidney cells (MDCK, ATCC CCL 34); buffalo rat liver cells (BRL 3A, ATCC CRL 1442); human lung cells (W138, ATCC CCL 75); human liver cells (Hep G2, HB 8065); mouse mammary tumor (MMT 060562, ATCC CCL51); TR1 cells (Mather et al., Annals N.Y. Acad. Sci. 383:44-68 (1982)); MRC 5 cells; FS4 cells; and a human hepatoma line (Hep G2).

[0790] Host cells are transformed with the above-described expression or cloning vectors for anti-TAT antibody or TAT polypeptide production and cultured in conventional nutrient media modified as appropriate for inducing promoters, selecting transformants, or amplifying the genes encoding the desired sequences.

[0791] 3. Selection and Use of a Replicable Vector

[0792] The nucleic acid (e.g., cDNA or genomic DNA) encoding anti-TAT antibody or TAT polypeptide may be inserted into a replicable vector for cloning (amplification of the DNA) or for expression. Various vectors are publicly available. The vector may, for example, be in the form of a plasmid, cosmid, viral particle, or phage. The appropriate nucleic acid sequence may be inserted into the vector by a variety of procedures. In general, DNA is inserted into an appropriate restriction endonuclease site(s) using techniques known in the art. Vector components generally include, but are not limited to, one or more of a signal sequence, an origin of replication, one or more marker genes, an enhancer element, a promoter, and a transcription termination sequence. Construction of suitable vectors containing one or more of these components employs standard ligation techniques which are known to the skilled artisan.

[0793] The TAT may be produced recombinantly not only directly, but also as a fusion polypeptide with a heterologous polypeptide, which may be a signal sequence or other polypeptide having a specific cleavage site at the N-terminus of the mature protein or polypeptide. In general, the signal sequence may be a component of the vector, or it may be a part of the anti-TAT antibody- or TAT polypeptide-encoding DNA that is inserted into the vector. The signal sequence may be a prokaryotic signal sequence selected, for example, from the group of the alkaline phosphatase, penicillinase, lpp, or heat-stable enterotoxin II leaders. For yeast secretion the signal sequence may be, e.g., the yeast invertase leader, alpha factor leader (including Saccharomyces and Kluyveromyces α-factor leaders, the latter described in U.S. Pat. No. 5,010,182), or acid phosphatase leader, the C. albicans glucoamylase leader (EP 362,179 published 4 Apr. 1990), or the signal described in WO 90/13646 published 15 Nov. 1990. In mammalian cell expression, mammalian signal sequences may be used to direct secretion of the protein, such as signal sequences from secreted polypeptides of the same or related species, as well as viral secretory leaders.

[0794] Both expression and cloning vectors contain a nucleic acid sequence that enables the vector to replicate in one or more selected host cells. Such sequences are well known for a variety of bacteria, yeast, and viruses.

[0795] The origin of replication from the plasmid pBR322 is suitable for most Gram-negative bacteria, the 2μ plasmid origin is suitable for yeast, and various viral origins (SV40, polyoma, adenovirus, VSV or BPV) are useful for cloning vectors in mammalian cells.

[0796] Expression and cloning vectors will typically contain a selection gene, also termed a selectable marker.

[0797] Typical selection genes encode proteins that (a) confer resistance to antibiotics or other toxins, e.g., ampicillin, neomycin, methotrexate, or tetracycline, (b) complement auxotrophic deficiencies, or (c) supply critical nutrients not available from complex media, e.g., the gene encoding D-alanine racemase for Bacilli.

[0798] An example of suitable selectable markers for mammalian cells are those that enable the identification of cells competent to take up the anti-TAT antibody- or TAT polypeptide-encoding nucleic acid, such as DHFR or thymidine kinase. An appropriate host cell when wild-type DHFR is employed is the CHO cell line deficient in DHFR activity, prepared and propagated as described by Urlaub et al., Proc. Natl. Acad. Sci. USA, 77:4216 (1980). A suitable selection gene for use in yeast is the trp1 gene present in the yeast plasmid YRp7 [Stinchcomb et al., Nature, 282:39 (1979); Kingsman et al., Gene, 7:141 (1979); Tschemper et al., Gene, 10:157 (1980)]. The trp1 gene provides a selection marker for a mutant strain of yeast lacking the ability to grow in tryptophan, for example, ATCC No. 44076 or PEP4-1 [Jones, Genetics, 85:12 (1977)].

[0799] Expression and cloning vectors usually contain a promoter operably linked to the anti-TAT antibody- or TAT polypeptide-encoding nucleic acid sequence to direct mRNA synthesis. Promoters recognized by a variety of potential host cells are well known. Promoters suitable for use with prokaryotic hosts include the β-lactamase and lactose promoter systems [Chang et al., Nature, 275:615 (1978); Goeddel et al., Nature, 281:544 (1979)], alkaline phosphatase, a tryptophan (trp) promoter system [Goeddel, Nucleic Acids Res., 8:4057 (1980); EP 36,776], and hybrid promoters such as the tac promoter [deBoer et al., Proc. Natl. Acad. Sci. USA, 80:21-25 (1983)]. Promoters for use in bacterial systems also will contain a Shine-Dalgarno (S.D.) sequence operably linked to the DNA encoding anti-TAT antibody or TAT polypeptide.

[0800] Examples of suitable promoting sequences for use with yeast hosts include the promoters for 3-phosphoglycerate kinase [Hitzeman et al., J. Biol. Chem., 255:2073 (1980)] or other glycolytic enzymes [Hess et al., J. Adv. Enzyme Reg., 7:149 (1968); Holland, Biochemistry, 17:4900 (1978)], such as enolase, glyceraldehyde-3-phosphate dehydrogenase, hexokinase, pyruvate decarboxylase, phosphofructokinase, glucose-6-phosphate isomerase, 3-phosphoglycerate mutase, pyruvate kinase, triosephosphate isomerase, phosphoglucose isomerase, and glucokinase.

[0801] Other yeast promoters, which are inducible promoters having the additional advantage of transcription controlled by growth conditions, are the promoter regions for alcohol dehydrogenase 2, isocytochrome C, acid phosphatase, degradative enzymes associated with nitrogen metabolism, metallothionein, glyceraldehyde-3-phosphate dehydrogenase, and enzymes responsible for maltose and galactose utilization. Suitable vectors and promoters for use in yeast expression are further described in EP 73,657.

[0802] Anti-TAT antibody or TAT polypeptide transcription from vectors in mammalian host cells is controlled, for example, by promoters obtained from the genomes of viruses such as polyoma virus, fowlpox virus (UK 2,211,504 published 5 Jul. 1989), adenovirus (such as Adenovirus 2), bovine papilloma virus, avian sarcoma virus, cytomegalovirus, a retrovirus, hepatitis-B virus and Simian Virus 40 (SV40), from heterologous mammalian promoters, e.g., the actin promoter or an immunoglobulin promoter, and from heat-shock promoters, provided such promoters are compatible with the host cell systems.

[0803] Transcription of a DNA encoding the anti-TAT antibody or TAT polypeptide by higher eukaryotes may be increased by inserting an enhancer sequence into the vector. Enhancers are cis-acting elements of DNA, usually about from 10 to 300 bp, that act on a promoter to increase its transcription. Many enhancer sequences are now known from mammalian genes (globin, elastase, albumin, α-fetoprotein, and insulin). Typically, however, one will use an enhancer from a eukaryotic cell virus. Examples include the SV40 enhancer on the late side of the replication origin (bp 100-270), the cytomegalovirus early promoter enhancer, the polyoma enhancer on the late side of the replication origin, and adenovirus enhancers. The enhancer may be spliced into the vector at a position 5′ or 3′ to the anti-TAT antibody or TAT polypeptide coding sequence, but is preferably located at a site 5′ from the promoter.

[0804] Expression vectors used in eukaryotic host cells (yeast, fungi, insect, plant, animal, human, or nucleated cells from other multicellular organisms) will also contain sequences necessary for the termination of transcription and for stabilizing the mRNA. Such sequences are commonly available from the 5′ and, occasionally 3′, untranslated regions of eukaryotic or viral DNAs or cDNAs. These regions contain nucleotide segments transcribed as polyadenylated fragments in the untranslated portion of the mRNA encoding anti-TAT antibody or TAT polypeptide.

[0805] Still other methods, vectors, and host cells suitable for adaptation to the synthesis of anti-TAT antibody or TAT polypeptide in recombinant vertebrate cell culture are described in Gething et al., Nature, 293:620-625 (1981); Mantei et al., Nature, 281:40-46 (1979); EP 117,060; and EP 117,058.

[0806] 4. Culturing the Host Cells

[0807] The host cells used to produce the anti-TAT antibody or TAT polypeptide of this invention may be cultured in a variety of media. Commercially available media such as Ham's F10 (Sigma), Minimal Essential Medium ((MEM), (Sigma), RPMI-1640 (Sigma), and Dulbecco's Modified Eagle's Medium ((DMEM), Sigma) are suitable for culturing the host cells. In addition, any of the media described in Ham et al., Meth. Enz. 58:44 (1979), Barnes et al., Anal. Biochem.102:255 (1980), U.S. Pat. Nos. 4,767,704; 4,657,866; 4,927,762; 4,560,655; or 5,122,469; WO 90/03430; WO 87/00195; or U.S. Pat. Re. 30,985 may be used as culture media for the host cells. Any of these media may be supplemented as necessary with hormones and/or other growth factors (such as insulin, transferrin, or epidermal growth factor), salts (such as sodium chloride, calcium, magnesium, and phosphate), buffers (such as HEPES), nucleotides (such as adenosine and thymidine), antibiotics (such as GENTAMYCIN™ drug), trace elements (defined as inorganic compounds usually present at final concentrations in the micromolar range), and glucose or an equivalent energy source. Any other necessary supplements may also be included at appropriate concentrations that would be known to those skilled in the art. The culture conditions, such as temperature, pH, and the like, are those previously used with the host cell selected for expression, and will be apparent to the ordinarily skilled artisan.

[0808] 5. Detecting Gene Amplification/Expression

[0809] Gene amplification and/or expression may be measured in a sample directly, for example, by conventional Southern blotting, Northern blotting to quantitate the transcription of mRNA [Thomas Proc. Natl. Acad. Sci. USA, 77:5201-5205 (1980)], dot blotting (DNA analysis), or in situ hybridization, using an appropriately labeled probe, based on the sequences provided herein. Alternatively, antibodies may be employed that can recognize specific duplexes, including DNA duplexes, RNA duplexes, and DNA-RNA hybrid duplexes or DNA-protein duplexes. The antibodies in turn may be labeled and the assay may be carried out where the duplex is bound to a surface, so that upon the formation of duplex on the surface, the presence of antibody bound to the duplex can be detected.

[0810] Gene expression, alternatively, may be measured by immunological methods, such as immunohistochemical staining of cells or tissue sections and assay of cell culture or body fluids, to quantitate directly the expression of gene product. Antibodies useful for immunohistochemical staining and/or assay of sample fluids may be either monoclonal or polyclonal, and may be prepared in any mammal. Conveniently, the antibodies may be prepared against a native sequence TAT polypeptide or against a synthetic peptide based on the DNA sequences provided herein or against exogenous sequence fused to TAT DNA and encoding a specific antibody epitope.

[0811] 6. Purification of Anti-TAT Antibody and TAT Polypeptide

[0812] Forms of anti-TAT antibody and TAT polypeptide may be recovered from culture medium or from host cell lysates. If membrane-bound, it can be released from the membrane using a suitable detergent solution (e.g. Triton-X 100) or by enzymatic cleavage. Cells employed in expression of anti-TAT antibody and TAT polypeptide can be disrupted by various physical or chemical means, such as freeze-thaw cycling, sonication, mechanical disruption, or cell lysing agents.

[0813] It may be desired to purify anti-TAT antibody and TAT polypeptide from recombinant cell proteins or polypeptides. The following procedures are exemplary of suitable purification procedures: by fractionation on an ion-exchange column; ethanol precipitation; reverse phase HPLC; chromatography on silica or on a cation-exchange resin such as DEAE; chromatofocusing; SDS-PAGE; ammonium sulfate precipitation; gel filtration using, for example, Sephadex G-75; protein A Sepharose columns to remove contaminants such as IgG; and metal chelating columns to bind epitope-tagged forms of the anti-TAT antibody and TAT polypeptide. Various methods of protein purification may be employed and such methods are known in the art and described for example in Deutscher, Methods in Enzymology, 182 (1990); Scopes, Protein Purification: Principles and Practice, Springer-Verlag, New York (1982). The purification step(s) selected will depend, for example, on the nature of the production process used and the particular anti-TAT antibody or TAT polypeptide produced.

[0814] When using recombinant techniques, the antibody can be produced intracellularly, in the periplasmic space, or directly secreted into the medium. If the antibody is produced intracellularly, as a first step, the particulate debris, either host cells or lysed fragments, are removed, for example, by centrifugation or ultrafiltration. Carter et al., Bio/Technology 10:163-167 (1992) describe a procedure for isolating antibodies which are secreted to the periplasmic space of E. coli. Briefly, cell paste is thawed in the presence of sodium acetate (pH 3.5), EDTA, and phenylmethylsulfonylfluoride (PMSF) over about 30 min. Cell debris can be removed by centrifugation. Where the antibody is secreted into the medium, supernatants from such expression systems are generally first concentrated using a commercially available protein concentration filter, for example, an Amicon or Millipore Pellicon ultrafiltration unit. A protease inhibitor such as PMSF may be included in any of the foregoing steps to inhibit proteolysis and antibiotics may be included to prevent the growth of adventitious contaminants.

[0815] The antibody composition prepared from the cells can be purified using, for example, hydroxylapatite chromatography, gel electrophoresis, dialysis, and affinity chromatography, with affinity chromatography being the preferred purification technique. The suitability of protein A as an affinity ligand depends on the species and isotype of any immunoglobulin Fc domain that is present in the antibody. Protein A can be used to purify antibodies that are based on human γ1, γ2 or γ4 heavy chains (Lindmark et al., J. Immunol. Meth. 62:1-13 (1983)). Protein G is recommended for all mouse isotypes and for human γ3 (Guss et al., EMBO J. 5:15671575 (1986)). The matrix to which the affinity ligand is attached is most often agarose, but other matrices are available. Mechanically stable matrices such as controlled pore glass or poly(styrenedivinyl)benzene allow for faster flow rates and shorter processing times than can be achieved with agarose. Where the antibody comprises a C_{H}3 domain, the Bakerbond ABX™ resin (J. T. Baker, Phillipsburg, N.J.) is useful for purification. Other techniques for protein purification such as fractionation on an ion-exchange column, ethanol precipitation, Reverse Phase HPLC, chromatography on silica, chromatography on heparin SEPHAROSE™ chromatography on an anion or cation exchange resin (such as a polyaspartic acid column), chromatofocusing, SDS-PAGE, and ammonium sulfate precipitation are also available depending on the antibody to be recovered.

[0816] Following any preliminary purification step(s), the mixture comprising the antibody of interest and contaminants may be subjected to low pH hydrophobic interaction chromatography using an elution buffer at a pH between about 2.5-4.5, preferably performed at low salt concentrations (e.g., from about 0-0.25M salt).

[0817] J. Pharmaceutical Formulations

[0818] Therapeutic formulations of the anti-TAT antibodies, TAT binding oligopeptides, TAT binding organic molecules and/or TAT polypeptides used in accordance with the present invention are prepared for storage by mixing the antibody, polypeptide, oligopeptide or organic molecule having the desired degree of purity with optional pharmaceutically acceptable carriers, excipients or stabilizers (Remington's Pharmaceutical Sciences 16th edition, Osol, A. Ed. (1980)), in the form of lyophilized formulations or aqueous solutions. Acceptable carriers, excipients, or stabilizers are nontoxic to recipients at the dosages and concentrations employed, and include buffers such as acetate, Tris, phosphate, citrate, and other organic acids; antioxidants including ascorbic acid and methionine; preservatives (such as octadecyldimethylbenzyl ammonium chloride; hexamethonium chloride; benzalkonium chloride, benzethonium chloride; phenol, butyl or benzyl alcohol; alkyl parabens such as methyl or propyl paraben; catechol; resorcinol; cyclohexanol; 3-pentanol; and m-cresol); low molecular weight (less than about 10 residues) polypeptides; proteins, such as serum albumin, gelatin, or immunoglobulins; hydrophilic polymers such as polyvinylpyrrolidone; amino acids such as glycine, glutamine, asparagine, histidine, arginine, or lysine; monosaccharides, disaccharides, and other carbohydrates including glucose, mannose, or dextrins; chelating agents such as EDTA; tonicifiers such as trehalose and sodium chloride; sugars such as sucrose, mannitol, trehalose or sorbitol; surfactant such as polysorbate; salt-forming counter-ions such as sodium; metal complexes (e.g., Zn-protein complexes); and/or non-ionic surfactants such as TWEEN®, PLURONICS® or polyethylene glycol (PEG). The antibody preferably comprises the antibody at a concentration of between 5-200 mg/ml, preferably between 10-100 mg/ml.

[0819] The formulations herein may also contain more than one active compound as necessary for the particular indication being treated, preferably those with complementary activities that do not adversely affect each other. For example, in addition to an anti-TAT antibody, TAT binding oligopeptide, or TAT binding organic molecule, it may be desirable to include in the one formulation, an additional antibody, e.g., a second anti-TAT antibody which binds a different epitope on the TAT polypeptide, or an antibody to some other target such as a growth factor that affects the growth of the particular cancer. Alternatively, or additionally, the composition may further comprise a chemotherapeutic agent, cytotoxic agent, cytokine, growth inhibitory agent, anti-hormonal agent, and/or cardioprotectant. Such molecules are suitably present in combination in amounts that are effective for the purpose intended.

[0820] The active ingredients may also be entrapped in microcapsules prepared, for example, by coacervation techniques or by interfacial polymerization, for example, hydroxymethylcellulose or gelatin-microcapsules and poly-(methylmethacylate) microcapsules, respectively, in colloidal drug delivery systems (for example, liposomes, albumin microspheres, microemulsions, nano-particles and nanocapsules) or in macroemulsions. Such techniques are disclosed in Remington's Pharmaceutical Sciences, 16th edition, Osol, A. Ed. (1980).

[0821] Sustained-release preparations may be prepared. Suitable examples of sustained-release preparations include semi-permeable matrices of solid hydrophobic polymers containing the antibody, which matrices are in the form of shaped articles, e.g., films, or microcapsules. Examples of sustained-release matrices include polyesters, hydrogels (for example, poly(2-hydroxyethyl-methacrylate), or poly(vinylalcohol)), polylactides (U.S. Pat. No. 3,773,919), copolymers of L-glutamic acid and γ ethyl-L-glutamate, non-degradable ethylene-vinyl acetate, degradable lactic acid-glycolic acid copolymers such as the LUPRON DEPOT® (injectable microspheres composed of lactic acid-glycolic acid copolymer and leuprolide acetate), and poly-D-(−)-3-hydroxybutyric acid.

[0822] The formulations to be used for in vivo administration must be sterile. This is readily accomplished by filtration through sterile filtration membranes.

[0823] K. Diagnosis and Treatment with Anti-TAT Antibodies, TAT Binding Oligopeptides and TAT Binding Organic Molecules

[0824] To determine TAT expression in the cancer, various diagnostic assays are available. In one embodiment, TAT polypeptide overexpression may be analyzed by immunohistochemistry (IHC). Parrafin embedded tissue sections from a tumor biopsy may be subjected to the IHC assay and accorded a TAT protein staining intensity criteria as follows:

[0825] Score 0— no staining is observed or membrane staining is observed in less than 10% of tumor cells.

[0826] Score 1+—a faint/barely perceptible membrane staining is detected in more than 10% of the tumor cells. The cells are only stained in part of their membrane.

[0827] Score 2+—a weak to moderate complete membrane staining is observed in more than 10% of the tumor cells.

[0828] Score 3+—a moderate to strong complete membrane staining is observed in more than 10% of the tumor cells.

[0829] Those tumors with 0 or 1+ scores for TAT polypeptide expression may be characterized as not overexpressing TAT, whereas those tumors with 2+ or 3+ scores may be characterized as overexpressing TAT.

[0830] Alternatively, or additionally, FISH assays such as the INFORM® (sold by Ventana, Arizona) or PATHVISION® (Vysis, Illinois) may be carried out on formalin-fixed, paraffin-embedded tumor tissue to determine the extent (if any) of TAT overexpression in the tumor.

[0831] TAT overexpression or amplification may be evaluated using an in vivo diagnostic assay, e.g., by administering a molecule (such as an antibody, oligopeptide or organic molecule) which binds the molecule to be detected and is tagged with a detectable label (e.g., a radioactive isotope or a fluorescent label) and externally scanning the patient for localization of the label.

[0832] As described above, the anti-TAT antibodies, oligopeptides and organic molecules of the invention have various non-therapeutic applications. The anti-TAT antibodies, oligopeptides and organic molecules of the present invention can be useful for diagnosis and staging of TAT polypeptide-expressing cancers (e.g., in radioimaging). The antibodies, oligopeptides and organic molecules are also useful for purification or immunoprecipitation of TAT polypeptide from cells, for detection and quantitation of TAT polypeptide in vitro, e.g., in an ELISA or a Western blot, to kill and eliminate TAT-expressing cells from a population of mixed cells as a step in the purification of other cells.

[0833] Currently, depending on the stage of the cancer, cancer treatment involves one or a combination of the following therapies: surgery to remove the cancerous tissue, radiation therapy, and chemotherapy. Anti-TAT antibody, oligopeptide or organic molecule therapy may be especially desirable in elderly patients who do not tolerate the toxicity and side effects of chemotherapy well and in metastatic disease where radiation therapy has limited usefulness. The tumor targeting anti-TAT antibodies, oligopeptides and organic molecules of the invention are useful to alleviate TAT-expressing cancers upon initial diagnosis of the disease or during relapse. For therapeutic applications, the anti-TAT antibody, oligopeptide or organic molecule can be used alone, or in combination therapy with, e.g., hormones, antiangiogens, or radiolabelled compounds, or with surgery, cryotherapy, and/or radiotherapy. Anti-TAT antibody, oligopeptide or organic molecule treatment can be administered in conjunction with other forms of conventional therapy, either consecutively with, pre- or post-conventional therapy. Chemotherapeutic drugs such as TAXOTERE® (docetaxel), TAXOL® (palictaxel), estramustine and mitoxantrone are used in treating cancer, in particular, in good risk patients. In the present method of the invention for treating or alleviating cancer, the cancer patient can be administered anti-TAT antibody, oligopeptide or organic molecule in conjuction with treatment with the one or more of the preceding chemotherapeutic agents. In particular, combination therapy with palictaxel and modified derivatives (see, e.g., EP0600517) is contemplated. The anti-TAT antibody, oligopeptide or organic molecule will be administered with a therapeutically effective dose of the chemotherapeutic agent. In another embodiment, the anti-TAT antibody, oligopeptide or organic molecule is administered in conjunction with chemotherapy to enhance the activity and efficacy of the chemotherapeutic agent, e.g., paclitaxel. The Physicians' Desk Reference (PDR) discloses dosages of these agents that have been used in treatment of various cancers. The dosing regimen and dosages of these aforementioned chemotherapeutic drugs that are therapeutically effective will depend on the particular cancer being treated, the extent of the disease and other factors familiar to the physician of skill in the art and can be determined by the physician.

[0834] In one particular embodiment, a conjugate comprising an anti-TAT antibody, oligopeptide or organic molecule conjugated with a cytotoxic agent is administered to the patient. Preferably, the immunoconjugate bound to the TAT protein is internalized by the cell, resulting in increased therapeutic efficacy of the immunoconjugate in killing the cancer cell to which it binds. In a preferred embodiment, the cytotoxic agent targets or interferes with the nucleic acid in the cancer cell. Examples of such cytotoxic agents are described above and include maytansinoids, calicheamicins, ribonucleases and DNA endonucleases.

[0835] The anti-TAT antibodies, oligopeptides, organic molecules or toxin conjugates thereof are administered to a human patient, in accord with known methods, such as intravenous administration, e.g., as a bolus or by continuous infusion over a period of time, by intramuscular, intraperitoneal, intracerobrospinal, subcutaneous, intra-articular, intrasynovial, intrathecal, oral, topical, or inhalation routes. Intravenous or subcutaneous administration of the antibody, oligopeptide or organic molecule is preferred.

[0836] Other therapeutic regimens may be combined with the administration of the anti-TAT antibody, oligopeptide or organic molecule. The combined administration includes co-administration, using separate formulations or a single pharmaceutical formulation, and consecutive administration in either order, wherein preferably there is a time period while both (or all) active agents simultaneously exert their biological activities. Preferably such combined therapy results in a synergistic therapeutic effect.

[0837] It may also be desirable to combine administration of the anti-TAT antibody or antibodies, oligopeptides or organic molecules, with administration of an antibody directed against another tumor antigen associated with the particular cancer.

[0838] In another embodiment, the therapeutic treatment methods of the present invention involves the combined administration of an anti-TAT antibody (or antibodies), oligopeptides or organic molecules and one or more chemotherapeutic agents or growth inhibitory agents, including co-administration of cocktails of different chemotherapeutic agents. Chemotherapeutic agents include estramustine phosphate, prednimustine, cisplatin, 5-fluorouracil, melphalan, cyclophosphamide, hydroxyurea and hydroxyureataxanes (such as paclitaxel and doxetaxel) and/or anthracycline antibiotics. Preparation and dosing schedules for such chemotherapeutic agents may be used according to manufacturers' instructions or as determined empirically by the skilled practitioner. Preparation and dosing schedules for such chemotherapy are also described in Chemotherapy Service Ed., M. C. Perry, Williams & Wilkins, Baltimore, Md. (1992).

[0839] The antibody, oligopeptide or organic molecule may be combined with an anti-hormonal compound; e.g., an anti-estrogen compound such as tamoxifen; an anti-progesterone such as onapristone (see, EP 616 812); or an anti-androgen such as flutamide, in dosages known for such molecules. Where the cancer to be treated is androgen independent cancer, the patient may previously have been subjected to anti-androgen therapy and, after the cancer becomes androgen independent, the anti-TAT antibody, oligopeptide or organic molecule (and optionally other agents as described herein) may be administered to the patient.

[0840] Sometimes, it may be beneficial to also co-administer a cardioprotectant (to prevent or reduce myocardial dysfunction associated with the therapy) or one or more cytokines to the patient. In addition to the above therapeutic regimes, the patient may be subjected to surgical removal of cancer cells and/or radiation therapy, before, simultaneously with, or post antibody, oligopeptide or organic molecule therapy. Suitable dosages for any of the above co-administered agents are those presently used and may be lowered due to the combined action (synergy) of the agent and anti-TAT antibody, oligopeptide or organic molecule.

[0841] For the prevention or treatment of disease, the dosage and mode of administration will be chosen by the physician according to known criteria. The appropriate dosage of antibody, oligopeptide or organic molecule will depend on the type of disease to be treated, as defined above, the severity and course of the disease, whether the antibody, oligopeptide or organic molecule is administered for preventive or therapeutic purposes, previous therapy, the patient's clinical history and response to the antibody, oligopeptide or organic molecule, and the discretion of the attending physician. The antibody, oligopeptide or organic molecule is suitably administered to the patient at one time or over a series of treatments. Preferably, the antibody, oligopeptide or organic molecule is administered by intravenous infusion or by subcutaneous injections. Depending on the type and severity of the disease, about 1 μg/kg to about 50 mg/kg body weight (e.g., about 0.1-15 mg/kg/dose) of antibody can be an initial candidate dosage for administration to the patient, whether, for example, by one or more separate administrations, or by continuous infusion. A dosing regimen can comprise administering an initial loading dose of about 4 mg/kg, followed by a weekly maintenance dose of about 2 mg/kg of the anti-TAT antibody. However, other dosage regimens may be useful. A typical daily dosage might range from about 1 μg/kg to 100 mg/kg or more, depending on the factors mentioned above. For repeated administrations over several days or longer, depending on the condition, the treatment is sustained until a desired suppression of disease symptoms occurs. The progress of this therapy can be readily monitored by conventional methods and assays and based on criteria known to the physician or other persons of skill in the art.

[0842] Aside from administration of the antibody protein to the patient, the present application contemplates administration of the antibody by gene therapy. Such administration of nucleic acid encoding the antibody is encompassed by the expression “administering a therapeutically effective amount of an antibody”. See, for example, WO96/07321 published Mar. 14, 1996 concerning the use of gene therapy to generate intracellular antibodies.

[0843] There are two major approaches to getting the nucleic acid (optionally contained in a vector) into the patient's cells; in vivo and ex vivo. For in vivo delivery the nucleic acid is injected directly into the patient, usually at the site where the antibody is required. For ex vivo treatment, the patient's cells are removed, the nucleic acid is introduced into these isolated cells and the modified cells are administered to the patient either directly or, for example, encapsulated within porous membranes which are implanted into the patient (see, e.g., U.S. Pat. Nos. 4,892,538 and 5,283,187). There are a variety of techniques available for introducing nucleic acids into viable cells. The techniques vary depending upon whether the nucleic acid is transferred into cultured cells in vitro, or in vivo in the cells of the intended host. Techniques suitable for the transfer of nucleic acid into mammalian cells in vitro include the use of liposomes, electroporation, microinjection, cell fusion, DEAE-dextran, the calcium phosphate precipitation method, etc. A commonly used vector for ex vivo delivery of the gene is a retroviral vector.

[0844] The currently preferred in vivo nucleic acid transfer techniques include transfection with viral vectors (such as adenovirus, Herpes simplex I virus, or adeno-associated virus) and lipid-based systems (useful lipids for lipid-mediated transfer of the gene are DOTMA, DOPE and DC-Chol, for example). For review of the currently known gene marking and gene therapy protocols see Anderson et al., Science 256:808-813 (1992). See also WO 93/25673 and the references cited therein.

[0845] The anti-TAT antibodies of the invention can be in the different forms encompassed by the definition of “antibody” herein. Thus, the antibodies include full length or intact antibody, antibody fragments, native sequence antibody or amino acid variants, humanized, chimeric or fusion antibodies, immunoconjugates, and functional fragments thereof. In fusion antibodies an antibody sequence is fused to a heterologous polypeptide sequence. The antibodies can be modified in the Fc region to provide desired effector functions. As discussed in more detail in the sections herein, with the appropriate Fc regions, the naked antibody bound on the cell surface can induce cytotoxicity, e.g., via antibody-dependent cellular cytotoxicity (ADCC) or by recruiting complement in complement dependent cytotoxicity, or some other mechanism. Alternatively, where it is desirable to eliminate or reduce effector function, so as to minimize side effects or therapeutic complications, certain other Fc regions may be used.

[0846] In one embodiment, the antibody competes for binding or bind substantially to, the same epitope as the antibodies of the invention. Antibodies having the biological characteristics of the present anti-TAT antibodies of the invention are also contemplated, specifically including the in vivo tumor targeting and any cell proliferation inhibition or cytotoxic characteristics.

[0847] Methods of producing the above antibodies are described in detail herein.

[0848] The present anti-TAT antibodies, oligopeptides and organic molecules are useful for treating a TAT-expressing cancer or alleviating one or more symptoms of the cancer in a mammal. Such a cancer includes prostate cancer, cancer of the urinary tract, lung cancer, breast cancer, colon cancer and ovarian cancer, more specifically, prostate adenocarcinoma, renal cell carcinomas, colorectal adenocarcinomas, lung adenocarcinomas, lung squamous cell carcinomas, and pleural mesothelioma. The cancers encompass metastatic cancers of any of the preceding. The antibody, oligopeptide or organic molecule is able to bind to at least a portion of the cancer cells that express TAT polypeptide in the mammal. In a preferred embodiment, the antibody, oligopeptide or organic molecule is effective to destroy or kill TAT-expressing tumor cells or inhibit the growth of such tumor cells, in vitro or in vivo, upon binding to TAT polypeptide on the cell. Such an antibody includes a naked anti-TAT antibody (not conjugated to any agent). Naked antibodies that have cytotoxic or cell growth inhibition properties can be further harnessed with a cytotoxic agent to render them even more potent in tumor cell destruction. Cytotoxic properties can be conferred to an anti-TAT antibody by, e.g., conjugating the antibody with a cytotoxic agent, to form an immunoconjugate as described herein. The cytotoxic agent or a growth inhibitory agent is preferably a small molecule. Toxins such as calicheamicin or a maytansinoid and analogs or derivatives thereof, are preferable.

[0849] The invention provides a composition comprising an anti-TAT antibody, oligopeptide or organic molecule of the invention, and a carrier. For the purposes of treating cancer, compositions can be administered to the patient in need of such treatment, wherein the composition can comprise one or more anti-TAT antibodies present as an immunoconjugate or as the naked antibody. In a further embodiment, the compositions can comprise these antibodies, oligopeptides or organic molecules in combination with other therapeutic agents such as cytotoxic or growth inhibitory agents, including chemotherapeutic agents. The invention also provides formulations comprising an anti-TAT antibody, oligopeptide or organic molecule of the invention, and a carrier. In one embodiment, the formulation is a therapeutic formulation comprising a pharmaceutically acceptable carrier.

[0850] Another aspect of the invention is isolated nucleic acids encoding the anti-TAT antibodies. Nucleic acids encoding both the H and L chains and especially the hypervariable region residues, chains which encode the native sequence antibody as well as variants, modifications and humanized versions of the antibody, are encompassed.

[0851] The invention also provides methods useful for treating a TAT polypeptide-expressing cancer or alleviating one or more symptoms of the cancer in a mammal, comprising administering a therapeutically effective amount of an anti-TAT antibody, oligopeptide or organic molecule to the mammal. The antibody, oligopeptide or organic molecule therapeutic compositions can be administered short term (acute) or chronic, or intermittent as directed by physician. Also provided are methods of inhibiting the growth of, and killing a TAT polypeptide-expressing cell.

[0852] The invention also provides kits and articles of manufacture comprising at least one anti-TAT antibody, oligopeptide or organic molecule. Kits containing anti-TAT antibodies, oligopeptides or organic molecules find use, e.g., for TAT cell killing assays, for purification or immunoprecipitation of TAT polypeptide from cells. For example, for isolation and purification of TAT, the kit can contain an anti-TAT antibody, oligopeptide or organic molecule coupled to beads (e.g., sepharose beads). Kits can be provided which contain the antibodies, oligopeptides or organic molecules for detection and quantitation of TAT in vitro, e.g., in an ELISA or a Western blot. Such antibody, oligopeptide or organic molecule useful for detection may be provided with a label such as a fluorescent or radiolabel.

[0853] L. Articles of Manufacture and Kits

[0854] Another embodiment of the invention is an article of manufacture containing materials useful for the treatment of anti-TAT expressing cancer. The article of manufacture comprises a container and a label or package insert on or associated with the container. Suitable containers include, for example, bottles, vials, syringes, etc. The containers may be formed from a variety of materials such as glass or plastic. The container holds a composition which is effective for treating the cancer condition and may have a sterile access port (for example the container may be an intravenous solution bag or a vial having a stopper pierceable by a hypodermic injection needle). At least one active agent in the composition is an anti-TAT antibody, oligopeptide or organic molecule of the invention. The label or package insert indicates that the composition is used for treating cancer. The label or package insert will further comprise instructions for administering the antibody, oligopeptide or organic molecule composition to the cancer patient. Additionally, the article of manufacture may further comprise a second container comprising a pharmaceutically-acceptable buffer, such as bacteriostatic water for injection (BWFI), phosphate-buffered saline, Ringer's solution and dextrose solution. It may further include other materials desirable from a commercial and user standpoint, including other buffers, diluents, filters, needles, and syringes.

[0855] Kits are also provided that are useful for various purposes, e.g., for TAT-expressing cell killing assays, for purification or immunoprecipitation of TAT polypeptide from cells. For isolation and purification of TAT polypeptide, the kit can contain an anti-TAT antibody, oligopeptide or organic molecule coupled to beads (e.g., sepharose beads). Kits can be provided which contain the antibodies, oligopeptides or organic molecules for detection and quantitation of TAT polypeptide in vitro, e.g., in an ELISA or a Western blot. As with the article of manufacture, the kit comprises a container and a label or package insert on or associated with the container. The container holds a composition comprising at least one anti-TAT antibody, oligopeptide or organic molecule of the invention. Additional containers may be included that contain, e.g., diluents and buffers, control antibodies. The label or package insert may provide a description of the composition as well as instructions for the intended in vitro or diagnostic use.

[0856] M. Uses for TAT Polypeptides and TAT-Polypeptide Encoding Nucleic Acids

[0857] Nucleotide sequences (or their complement) encoding TAT polypeptides have various applications in the art of molecular biology, including uses as hybridization probes, in chromosome and gene mapping and in the generation of anti-sense RNA and DNA probes. TAT-encoding nucleic acid will also be useful for the preparation of TAT polypeptides by the recombinant techniques described herein, wherein those TAT polypeptides may find use, for example, in the preparation of anti-TAT antibodies as described herein.

[0858] The full-length native sequence TAT gene, or portions thereof, may be used as hybridization probes for a cDNA library to isolate the full-length TAT cDNA or to isolate still other cDNAs (for instance, those encoding naturally-occurring variants of TAT or TAT from other species) which have a desired sequence identity to the native TAT sequence disclosed herein. Optionally, the length of the probes will be about 20 to about 50 bases. The hybridization probes may be derived from at least partially novel regions of the full length native nucleotide sequence wherein those regions may be determined without undue experimentation or from genomic sequences including promoters, enhancer elements and introns of native sequence TAT. By way of example, a screening method will comprise isolating the coding region of the TAT gene using the known DNA sequence to synthesize a selected probe of about 40 bases. Hybridization probes may be labeled by a variety of labels, including radionucleotides such as ³²P or ³⁵S, or enzymatic labels such as alkaline phosphatase coupled to the probe via avidin/biotin coupling systems. Labeled probes having a sequence complementary to that of the TAT gene of the present invention can be used to screen libraries of human cDNA, genomic DNA or mRNA to determine which members of such libraries the probe hybridizes to. Hybridization techniques are described in further detail in the Examples below. Any EST sequences disclosed in the present application may similarly be employed as probes, using the methods disclosed herein.

[0859] Other useful fragments of the TAT-encoding nucleic acids include antisense or sense oligonucleotides comprising a singe-stranded nucleic acid sequence (either RNA or DNA) capable of binding to target TAT mRNA (sense) or TAT DNA (antisense) sequences. Antisense or sense oligonucleotides, according to the present invention, comprise a fragment of the coding region of TAT DNA. Such a fragment generally comprises at least about 14 nucleotides, preferably from about 14 to 30 nucleotides. The ability to derive an antisense or a sense oligonucleotide, based upon a cDNA sequence encoding a given protein is described in, for example, Stein and Cohen (Cancer Res. 48:2659, 1988) and van der Krol et al. (BioTechnigues 6:958, 1988).

[0860] Binding of antisense or sense oligonucleotides to target nucleic acid sequences results in the formation of duplexes that block transcription or translation of the target sequence by one of several means, including enhanced degradation of the duplexes, premature termination of transcription or translation, or by other means. Such methods are encompassed by the present invention. The antisense oligonucleotides thus may be used to block expression of TAT proteins, wherein those TAT proteins may play a role in the induction of cancer in mammals. Antisense or sense oligonucleotides further comprise oligonucleotides having modified sugar-phosphodiester backbones (or other sugar linkages, such as those described in WO 91/06629) and wherein such sugar linkages are resistant to endogenous nucleases. Such oligonucleotides with resistant sugar linkages are stable in vivo (i.e., capable of resisting enzymatic degradation) but retain sequence specificity to be able to bind to target nucleotide sequences.

[0861] Preferred intragenic sites for antisense binding include the region incorporating the translation initiation/start codon (5′-AUG/5′-ATG) or termination/stop codon (5′-UAA, 5′-UAG and 5-UGA/5′-TAA, 5′-TAG and 5′-TGA) of the open reading frame (ORF) of the gene. These regions refer to a portion of the mRNA or gene that encompasses from about 25 to about 50 contiguous nucleotides in either direction (i.e., 5′ or 3′) from a translation initiation or termination codon. Other preferred regions for antisense binding include: introns; exons; intron-exon junctions; the open reading frame (ORF) or “coding region,” which is the region between the translation initiation codon and the translation termination codon; the 5′ cap of an mRNA which comprises an N7-methylated guanosine residue joined to the 5′-most residue of the mRNA via a 5′-5′ triphosphate linkage and includes 5′ cap structure itself as well as the first 50 nucleotides adjacent to the cap; the 5′ untranslated region (5′UTR), the portion of an mRNA in the 5′ direction from the translation initiation codon, and thus including nucleotides between the 5′ cap site and the translation initiation codon of an mRNA or corresponding nucleotides on the gene; and the 3′ untranslated region (3′UTR), the portion of an mRNA in the 3′ direction from the translation termination codon, and thus including nucleotides between the translation termination codon and 3′ end of an mRNA or corresponding nucleotides on the gene.

[0862] Specific examples of preferred antisense compounds useful for inhibiting expression of TAT proteins include oligonucleotides containing modified backbones or non-natural internucleoside linkages. Oligonucleotides having modified backbones include those that retain a phosphorus atom in the backbone and those that do not have a phosphorus atom in the backbone. For the purposes of this specification, and as sometimes referenced in the art, modified oligonucleotides that do not have a phosphorus atom in their internucleoside backbone can also be considered to be oligonucleosides. Preferred modified oligonucleotide backbones include, for example, phosphorothioates, chiral phosphorothioates, phosphorodithioates, phosphotriesters, aminoalkylphosphotri-esters, methyl and other alkyl phosphonates including 3′-alkylene phosphonates, 5′-alkylene phosphonates and chiral phosphonates, phosphinates, phosphoramidates including 3′-amino phosphoramidate and aminoalkylphosphoramidates, thionophosphoramidates, thionoalkylphosphonates, thionoalkylphosphotriesters, selenophosphates and borano-phosphates having normal 3′-5′ linkages, 2′-5′ linked analogs of these, and those having inverted polarity wherein one or more internucleotide linkages is a 3′ to 3′, 5′ to 5′ or 2′ to 2′ linkage. Preferred oligonucleotides having inverted polarity comprise a single 3′ to 3′ linkage at the 3′-most internucleotide linkage i.e. a single inverted nucleoside residue which may be abasic (the nucleobase is missing or has a hydroxyl group in place thereof). Various salts, mixed salts and free acid forms are also included. Representative United States patents that teach the preparation of phosphorus-containing linkages include, but are not limited to, U.S. Pat. Nos. 3,687,808; 4,469,863; 4,476,301; 5,023,243; 5,177,196; 5,188,897; 5,264,423; 5,276,019; 5,278,302; 5,286,717; 5,321,131; 5,399,676; 5,405,939; 5,453,496; 5,455,233; 5,466,677; 5,476,925; 5,519,126; 5,536,821; 5,541,306; 5,550,111; 5,563,253; 5,571,799; 5,587,361; 5,194,599; 5,565,555; 5,527,899; 5,721,218; 5,672,697 and 5,625,050, each of which is herein incorporated by reference.

[0863] Preferred modified oligonucleotide backbones that do not include a phosphorus atom therein have backbones that are formed by short chain alkyl or cycloalkyl internucleoside linkages, mixed heteroatom and alkyl or cycloalkyl internucleoside linkages, or one or more short chain heteroatomic or heterocyclic internucleoside linkages. These include those having morpholino linkages (formed in part from the sugar portion of a nucleoside); siloxane backbones; sulfide, sulfoxide and sulfone backbones; formacetyl and thioformacetyl backbones; methylene formacetyl and thioformacetyl backbones; riboacetyl backbones; alkene containing backbones; sulfamate backbones; methyleneimino and methylenehydrazino backbones; sulfonate and sulfonamide backbones; amide backbones; and others having mixed N, O, S and CH.sub.2 component parts. Representative United States patents that teach the preparation of such oligonucleosides include, but are not limited to, U.S. Pat. Nos. 5,034,506; 5,166,315; 5,185,444; 5,214,134; 5,216,141; 5,235,033; 5,264,562; 5,264,564; 5,405,938; 5,434,257; 5,466,677; 5,470,967; 5,489,677; 5,541,307; 5,561,225; 5,596,086; 5,602,240; 5,610,289; 5,602,240; 5,608,046; 5,610,289; 5,618,704; 5,623,070; 5,663,312; 5,633,360; 5,677,437; 5,792,608; 5,646,269 and 5,677,439, each of which is herein incorporated by reference.

[0864] In other preferred antisense oligonucleotides, both the sugar and the internucleoside linkage, i.e., the backbone, of the nucleotide units are replaced with novel groups. The base units are maintained for hybridization with an appropriate nucleic acid target compound. One such oligomeric compound, an oligonucleotide mimetic that has been shown to have excellent hybridization properties, is referred to as a peptide nucleic acid (PNA). In PNA compounds, the sugar-backbone of an oligonucleotide is replaced with an amide containing backbone, in particular an aminoethylglycine backbone. The nucleobases are retained and are bound directly or indirectly to aza nitrogen atoms of the amide portion of the backbone. Representative United States patents that teach the preparation of PNA compounds include, but are not limited to, U.S. Pat. Nos.: 5,539,082; 5,714,331; and 5,719,262, each of which is herein incorporated by reference. Further teaching of PNA compounds can be found in Nielsen et al., Science, 1991, 254, 1497-1500.

[0865] Preferred antisense oligonucleotides incorporate phosphorothioate backbones and/or heteroatom backbones, and in particular —CH₂—NH—O—CH₂—, —CH₂—N(CH₃)—O—CH₂— [known as a methylene (methylimino) or MMI backbone], —CH₂—O—N(CH₃)—CH₂—, —CH₂—N(CH₃)—N(CH₃)—CH₂— and —O—N(CH₃)—CH₂—CH₂— [wherein the native phosphodiester backbone is represented as —O—P—O—CH₂-] described in the above referenced U.S. Pat. No. 5,489,677, and the amide backbones of the above referenced U.S. Pat. No. 5,602,240. Also preferred are antisense oligonucleotides having morpholino backbone structures of the above-referenced U.S. Pat. No. 5,034,506.

[0866] Modified oligonucleotides may also contain one or more substituted sugar moieties. Preferred oligonucleotides comprise one of the following at the 2′ position: OH; F; O-alkyl, S-alkyl, or N-alkyl; O-alkenyl, S-alkeynyl, or N-alkenyl; O-alkynyl, S-alkynyl or N-alkynyl; or O-alkyl-O-alkyl, wherein the alkyl, alkenyl and alkynyl may be substituted or unsubstituted C, to C₁₀ alkyl or C₂ to C₁₀ alkenyl and alkynyl.

[0867] Particularly preferred are O[(CH₂)ₙO]ₘCH₃, O(CH₂)ₙOCH₃, O(CH₂)ₙNH₂, O(CH₂)ₙCH₃, O(CH₂)ₙONH₂, and O(CH₂)ₙON[(CH₂)ₙCH₃)]₂, where n and m are from 1 to about 10. Other preferred antisense oligonucleotides comprise one of the following at the 2′ position: C₁ to C₁₀ lower alkyl, substituted lower alkyl, alkenyl, alkynyl, alkaryl, aralkyl, O-alkaryl or O-aralkyl, SH, SCH₃, OCN, Cl, Br, CN, CF₃, OCF₃, SOCH₃, SO₂ CH₃, ONO₂, NO₂, N₃, NH₂, heterocycloalkyl, heterocycloalkaryl, aminoalkylamino, polyalkylamino, substituted silyl, an RNA cleaving group, a reporter group, an intercalator, a group for improving the pharmacokinetic properties of an oligonucleotide, or a group for improving the pharmacodynamic properties of an oligonucleotide, and other substituents having similar properties. A preferred modification includes 2′-methoxyethoxy (2′-O—CH₂CH₂OCH₃, also known as 2′-O-(2-methoxyethyl) or 2′-MOE) (Martin et al., Helv. Chim. Acta, 1995, 78, 486-504) i.e., an alkoxyalkoxy group. A further preferred modification includes 2′-dimethylaminooxyethoxy, i.e., a O(CH₂)₂ON(CH₃), group, also known as 2′-DMAOE, as described in examples hereinbelow, and 2′-dimethylaminoethoxyethoxy (also known in the art as 2′-O-dimethylaminoethoxyethyl or 2′-DMAEOE), i.e., 2′-O—CH₂—O—CH₂—N(CH₂).

[0868] A further prefered modification includes Locked Nucleic Acids (LNAs) in which the 2′-hydroxyl group is linked to the 3′ or 4′ carbon atom of the sugar ring thereby forming a bicyclic sugar moiety. The linkage is preferably a methelyne (—CH₂—), group bridging the 2′ oxygen atom and the 4′ carbon atom wherein n is 1 or 2. LNAs and preparation thereof are described in WO 98/39352 and WO 99/14226.

[0869] Other preferred modifications include 2′-methoxy (2′-O—CH₃), 2′-aminopropoxy (2′-OCH₂CH₂CH₂ NH₂), 2′-allyl (2′-CH₂—CH═CH₂), 2′-O-allyl (2′-O—CH₂—CH═CH₂) and 2′-fluoro (2′-F). The 2′-modification may be in the arabino (up) position or ribo (down) position. A preferred 2′-arabino modification is 2′-F. Similar modifications may also be made at other positions on the oligonucleotide, particularly the 3′ position of the sugar on the 3′ terminal nucleotide or in 2′-5′ linked oligonucleotides and the 5′ position of 5′ terminal nucleotide. Oligonucleotides may also have sugar mimetics such as cyclobutyl moieties in place of the pentofuranosyl sugar. Representative United States patents that teach the preparation of such modified sugar structures include, but are not limited to, U.S. Pat. Nos. 4,981,957; 5,118,800; 5,319,080; 5,359,044; 5,393,878; 5,446,137; 5,466,786; 5,514,785; 5,519,134; 5,567,811; 5,576,427; 5,591,722; 5,597,909; 5,610,300; 5,627,053; 5,639,873; 5,646,265; 5,658,873; 5,670,633; 5,792,747; and 5,700,920, each of which is herein incorporated by reference in its entirety.

[0870] Oligonucleotides may also include nucleobase (often referred to in the art simply as “base”) modifications or substitutions. As used herein, “unmodified” or “natural” nucleobases include the purine bases adenine (A) and guanine (G), and the pyrimidine bases thymine (T), cytosine (C) and uracil (U). Modified nucleobases include other synthetic and natural nucleobases such as 5-methylcytosine (5-me-C), 5-hydroxymethyl cytosine, xanthine, hypoxanthine, 2-aminoadenine, 6-methyl and other alkyl derivatives of adenine and guanine, 2-propyl and other alkyl derivatives of adenine and guanine, 2-thiouracil, 2-thiothymine and 2-thiocytosine, 5-halouracil and cytosine, 5-propynyl (—C═C—CH₃ or —CH₂—C═CH) uracil and cytosine and other alkynyl derivatives of pyrimidine bases, 6-azo uracil, cytosine and thymine, 5-uracil (pseudouracil), 4-thiouracil, 8-halo, 8-amino, 8-thiol, 8-thioalkyl, 8-hydroxyl and other 8-substituted adenines and guanines, 5-halo particularly 5-bromo, 5-trifluoromethyl and other 5-substituted uracils and cytosines, 7-methylguanine and 7-methyladenine, 2-F-adenine, 2-amino-adenine, 8-azaguanine and 8-azaadenine, 7-deazaguanine and 7-deazaadenine and 3-deazaguanine and 3-deazaadenine. Further modified nucleobases include tricyclic pyrimidines such as phenoxazine cytidine(1H-pyrimido[5,4-b][1,4]benzoxazin-2(3H)-one), phenothiazine cytidine (1H-pyrimido[5,4-b][1,4]benzothiazin-2(3H)-one), G-clamps such as a substituted phenoxazine cytidine (e.g. 9-(2-aminoethoxy)-H-pyrimido [5,4-b][1,4]benzoxazin-2(3H)-one), carbazole cytidine (2H-pyrimido[4,5-b]indol-2-one), pyridoindole cytidine (H-pyrido[3′,2′:4,5]pyrrolo[2,3-d]pyrimidin-2-one). Modified nucleobases may also include those in which the purine or pyrimidine base is replaced with other heterocycles, for example 7-deaza-adenine, 7-deazaguanosine, 2-aminopyridine and 2-pyridone. Further nucleobases include those disclosed in U.S. Pat. No. 3,687,808, those disclosed in The Concise Encyclopedia Of Polymer Science And Engineering, pages 858-859, Kroschwitz, J. I., ed. John Wiley & Sons, 1990, and those disclosed by Englisch et al., Angewandte Chemie, International Edition, 1991, 30, 613. Certain of these nucleobases are particularly useful for increasing the binding affinity of the oligomeric compounds of the invention. These include 5-substituted pyrimidines, 6-azapyrimidines and N-2, N-6 and 0-6 substituted purines, including 2-aminopropyladenine, 5-propynyluracil and 5-propynylcytosine. 5-methylcytosine substitutions have been shown to increase nucleic acid duplex stability by 0.6-1.2.degree. C. (Sanghvi et al, Antisense Research and Applications, CRC Press, Boca Raton, 1993, pp. 276-278) and are preferred base substitutions, even more particularly when combined with 2′-O-methoxyethyl sugar modifications. Representative United States patents that teach the preparation of modified nucleobases include, but are not limited to: U.S. Pat. No. 3,687,808, as well as U.S. Pat. Nos. 4,845,205; 5,130,302; 5,134,066; 5,175,273; 5,367,066; 5,432,272; 5,457,187; 5,459,255; 5,484,908; 5,502,177; 5,525,711; 5,552,540; 5,587,469; 5,594,121, 5,596,091; 5,614,617; 5,645,985; 5,830,653; 5,763,588; 6,005,096; 5,681,941 and 5,750,692, each of which is herein incorporated by reference.

[0871] Another modification of antisense oligonucleotides chemically linking to the oligonucleotide one or more moieties or conjugates which enhance the activity, cellular distribution or cellular uptake of the oligonucleotide. The compounds of the invention can include conjugate groups covalently bound to functional groups such as primary or secondary hydroxyl groups. Conjugate groups of the invention include intercalators, reporter molecules, polyamines, polyamides, polyethylene glycols, polyethers, groups that enhance the pharmacodynamic properties of oligomers, and groups that enhance the pharmacokinetic properties of oligomers. Typical conjugates groups include cholesterols, lipids, cation lipids, phospholipids, cationic phospholipids, biotin, phenazine, folate, phenanthridine, anthraquinone, acridine, fluoresceins, rhodamines, coumarins, and dyes. Groups that enhance the pharmacodynamic properties, in the context of this invention, include groups that improve oligomer uptake, enhance oligomer resistance to degradation, and/or strengthen sequence-specific hybridization with RNA. Groups that enhance the pharmacokinetic properties, in the context of this invention, include groups that improve oligomer uptake, distribution, metabolism or excretion. Conjugate moieties include but are not limited to lipid moieties such as a cholesterol moiety (Letsinger et al., Proc. Natl. Acad. Sci. USA, 1989, 86, 6553-6556), cholic acid (Manoharan et al., Bioorg. Med. Chem. Let., 1994, 4, 1053-1060), a thioether, e.g., hexyl-S-tritylthiol (Manoharan et al., Ann. N.Y. Acad. Sci., 1992, 660, 306-309; Manoharan et al., Bioorg. Med. Chem. Let., 1993, 3, 2765-2770), a thiocholesterol (Oberhauser et al., Nucl. Acids Res., 1992, 20, 533-538), an aliphatic chain, e.g., dodecandiol or undecyl residues (Saison-Behmoaras et al., EMBO J., 1991, 10, 1111-1118; Kabanov et al., FEBS Lett., 1990, 259, 327-330; Svinarchuk et al., Biochimie, 1993, 75, 49-54), a phospholipid, e.g., di-hexadecyl-rac-glycerol or triethyl-ammonium 1,2-di-O-hexadecyl-rac-glycero-3-H-phosphonate (Manoharan et al., Tetrahedron Lett., 1995, 36, 3651-3654; Shea et al., Nucl. Acids Res., 1990, 18, 3777-3783), a polyamine or a polyethylene glycol chain (Manoharan et al., Nucleosides & Nucleotides, 1995, 14, 969-973), or adamantane acetic acid (Manoharan et al., Tetrahedron Lett., 1995, 36, 3651-3654), a palmityl moiety (Mishra et al., Biochim. Biophys. Acta, 1995, 1264, 229-237), or an octadecylamine or hexylamino-carbonyl-oxycholesterol moiety. Oligonucleotides of the invention may also be conjugated to active drug substances, for example, aspirin, warfarin, phenylbutazone, ibuprofen, suprofen, fenbufen, ketoprofen, (S)-(+)-pranoprofen, carprofen, dansylsarcosine, 2,3,5-triiodobenzoic acid, flufenamic acid, folinic acid, a benzothiadiazide, chlorothiazide, a diazepine, indomethicin, a barbiturate, a cephalosporin, a sulfa drug, an antidiabetic, an antibacterial or an antibiotic. Oligonucleotide-drug conjugates and their preparation are described in U.S. patent application Ser. No. 09/334,130 (filed Jun. 15, 1999) and U.S. Pat. Nos.: 4,828,979; 4,948,882; 5,218,105; 5,525,465; 5,541,313; 5,545,730; 5,552,538; 5,578,717, 5,580,731; 5,580,731; 5,591,584; 5,109,124; 5,118,802; 5,138,045; 5,414,077; 5,486,603; 5,512,439; 5,578,718; 5,608,046; 4,587,044; 4,605,735; 4,667,025; 4,762,779; 4,789,737; 4,824,941; 4,835,263; 4,876,335; 4,904,582; 4,958,013; 5,082,830; 5,112,963; 5,214,136; 5,082,830; 5,112,963; 5,214,136; 5,245,022; 5,254,469; 5,258,506; 5,262,536; 5,272,250; 5,292,873; 5,317,098; 5,371,241, 5,391,723; 5,416,203, 5,451,463; 5,510,475; 5,512,667; 5,514,785; 5,565,552; 5,567,810; 5,574,142; 5,585,481; 5,587,371; 5,595,726; 5,597,696; 5,599,923; 5,599,928 and 5,688,941, each of which is herein incorporated by reference.

[0872] It is not necessary for all positions in a given compound to be uniformly modified, and in fact more than one of the aforementioned modifications may be incorporated in a single compound or even at a single nucleoside within an oligonucleotide. The present invention also includes antisense compounds which are chimeric compounds. “Chimeric” antisense compounds or “chimeras,” in the context of this invention, are antisense compounds, particularly oligonucleotides, which contain two or more chemically distinct regions, each made up of at least one monomer unit, i.e., a nucleotide in the case of an oligonucleotide compound. These oligonucleotides typically contain at least one region wherein the oligonucleotide is modified so as to confer upon the oligonucleotide increased resistance to nuclease degradation, increased cellular uptake, and/or increased binding affinity for the target nucleic acid. An additional region of the oligonucleotide may serve as a substrate for enzymes capable of cleaving RNA:DNA or RNA:RNA hybrids. By way of example, RNase H is a cellular endonuclease which cleaves the RNA strand of an RNA:DNA duplex. Activation of RNase H, therefore, results in cleavage of the RNA target, thereby greatly enhancing the efficiency of oligonucleotide inhibition of gene expression. Consequently, comparable results can often be obtained with shorter oligonucleotides when chimeric oligonucleotides are used, compared to phosphorothioate deoxyoligonucleotides hybridizing to the same target region. Chimeric antisense compounds of the invention may be formed as composite structures of two or more oligonucleotides, modified oligonucleotides, oligonucleosides and/or oligonucleotide mimetics as described above. Preferred chimeric antisense oligonucleotides incorporate at least one 2′ modified sugar (preferably 2′-O—(CH₂)₂—O—CH₃) at the 3′ terminal to confer nuclease resistance and a region with at least 4 contiguous 2′-H sugars to confer RNase H activity. Such compounds have also been referred to in the art as hybrids or gapmers. Preferred gapmers have a region of 2′ modified sugars (preferably 2′-O—(CH₂)₂—O—CH₃) at the 3′-terminal and at the 5′ terminal separated by at least one region having at least 4 contiguous 2′-H sugars and preferably incorporate phosphorothioate backbone linkages. Representative United States patents that teach the preparation of such hybrid structures include, but are not limited to, U.S. Pat. Nos. 5,013,830; 5,149,797; 5,220,007; 5,256,775; 5,366,878; 5,403,711; 5,491,133; 5,565,350; 5,623,065; 5,652,355; 5,652,356; and 5,700,922, each of which is herein incorporated by reference in its entirety.

[0873] The antisense compounds used in accordance with this invention may be conveniently and routinely made through the well-known technique of solid phase synthesis. Equipment for such synthesis is sold by several vendors including, for example, Applied Biosystems (Foster City, Calif.). Any other means for such synthesis known in the art may additionally or alternatively be employed. It is well known to use similar techniques to prepare oligonucleotides such as the phosphorothioates and alkylated derivatives. The compounds of the invention may also be admixed, encapsulated, conjugated or otherwise associated with other molecules, molecule structures or mixtures of compounds, as for example, liposomes, receptor targeted molecules, oral, rectal, topical or other formulations, for assisting in uptake, distribution and/or absorption. Representative United States patents that teach the preparation of such uptake, distribution and/or absorption assisting formulations include, but are not limited to, U.S. Pat. Nos. 5,108,921; 5,354,844; 5,416,016; 5,459,127; 5,521,291; 5,543,158; 5,547,932; 5,583,020; 5,591,721; 4,426,330; 4,534,899; 5,013,556; 5,108,921; 5,213,804; 5,227,170; 5,264,221; 5,356,633; 5,395,619; 5,416,016; 5,417,978; 5,462,854; 5,469,854; 5,512,295; 5,527,528; 5,534,259; 5,543,152; 5,556,948; 5,580,575; and 5,595,756, each of which is herein incorporated by reference.

[0874] Other examples of sense or antisense oligonucleotides include those oligonucleotides which are covalently linked to organic moieties, such as those described in WO 90/10048, and other moieties that increases affinity of the oligonucleotide for a target nucleic acid sequence, such as poly-(L-lysine). Further still, intercalating agents, such as ellipticine, and alkylating agents or metal complexes may be attached to sense or antisense oligonucleotides to modify binding specificities of the antisense or sense oligonucleotide for the target nucleotide sequence.

[0875] Antisense or sense oligonucleotides may be introduced into a cell containing the target nucleic acid sequence by any gene transfer method, including, for example, CaPO₄-mediated DNA transfection, electroporation, or by using gene transfer vectors such as Epstein-Barr virus. In a preferred procedure, an antisense or sense oligonucleotide is inserted into a suitable retroviral vector. A cell containing the target nucleic acid sequence is contacted with the recombinant retroviral vector, either in vivo or ex vivo. Suitable retroviral vectors include, but are not limited to, those derived from the murine retrovirus M-MuLV, N2 (a retrovirus derived from M-MuLV), or the double copy vectors designated DCT5A, DCTSB and DCT5C (see WO 90/13641).

[0876] Sense or antisense oligonucleotides also may be introduced into a cell containing the target nucleotide sequence by formation of a conjugate with a ligand binding molecule, as described in WO 91/04753. Suitable ligand binding molecules include, but are not limited to, cell surface receptors, growth factors, other cytokines, or other ligands that bind to cell surface receptors. Preferably, conjugation of the ligand binding molecule does not substantially interfere with the ability of the ligand binding molecule to bind to its corresponding molecule or receptor, or block entry of the sense or antisense oligonucleotide or its conjugated version into the cell.

[0877] Alternatively, a sense or an antisense oligonucleotide may be introduced into a cell containing the target nucleic acid sequence by formation of an oligonucleotide-lipid complex, as described in WO 90/10448.

[0878] The sense or antisense oligonucleotide-lipid complex is preferably dissociated within the cell by an endogenous lipase.

[0879] Antisense or sense RNA or DNA molecules are generally at least about 5 nucleotides in length, alternatively at least about 6, 7, 8, 9, 10, 11, 12, 13, 14, 15, 16, 17, 18, 19, 20, 21, 22, 23, 24, 25, 26, 27, 28, 29, 30, 35, 40, 45, 50, 55, 60, 65, 70, 75, 80, 85, 90, 95, 100, 105, 110, 115, 120, 125, 130, 135, 140, 145, 150, 155, 160, 165, 170, 175, 180, 185, 190, 195, 200, 210, 220, 230, 240, 250, 260, 270, 280, 290, 300, 310, 320, 330, 340, 350, 360, 370, 380, 390, 400, 410, 420, 430, 440, 450, 460, 470, 480, 490, 500, 510, 520, 530, 540, 550, 560, 570, 580, 590, 600, 610, 620, 630, 640, 650, 660, 670, 680, 690, 700, 710, 720, 730, 740, 750, 760, 770, 780, 790, 800, 810, 820, 830, 840, 850, 860, 870, 880, 890, 900, 910, 920, 930, 940, 950, 960, 970, 980, 990, or 1000 nucleotides in length, wherein in this context the term “about” means the referenced nucleotide sequence length plus or minus 10% of that referenced length.

[0880] The probes may also be employed in PCR techniques to generate a pool of sequences for identification of closely related TAT coding sequences.

[0881] Nucleotide sequences encoding a TAT can also be used to construct hybridization probes for mapping the gene which encodes that TAT and for the genetic analysis of individuals with genetic disorders. The nucleotide sequences provided herein may be mapped to a chromosome and specific regions of a chromosome using known techniques, such as in situ hybridization, linkage analysis against known chromosomal markers, and hybridization screening with libraries.

[0882] When the coding sequences for TAT encode a protein which binds to another protein (example, where the TAT is a receptor), the TAT can be used in assays to identify the other proteins or molecules involved in the binding interaction. By such methods, inhibitors of the receptor/ligand binding interaction can be identified. Proteins involved in such binding interactions can also be used to screen for peptide or small molecule inhibitors or agonists of the binding interaction. Also, the receptor TAT can be used to isolate correlative ligand(s). Screening assays can be designed to find lead compounds that mimic the biological activity of a native TAT or a receptor for TAT. Such screening assays will include assays amenable to high-throughput screening of chemical libraries, making them particularly suitable for identifying small molecule drug candidates. Small molecules contemplated include synthetic organic or inorganic compounds. The assays can be performed in a variety of formats, including protein-protein binding assays, biochemical screening assays, immunoassays and cell based assays, which are well characterized in the art.

[0883] Nucleic acids which encode TAT or its modified forms can also be used to generate either transgenic animals or “knock out” animals which, in turn, are useful in the development and screening of therapeutically useful reagents. A transgenic animal (e.g., a mouse or rat) is an animal having cells that contain a transgene, which transgene was introduced into the animal or an ancestor of the animal at a prenatal, e.g., an embryonic stage. A transgene is a DNA which is integrated into the genome of a cell from which a transgenic animal develops. In one embodiment, cDNA encoding TAT can be used to clone genomic DNA encoding TAT in accordance with established techniques and the genomic sequences used to generate transgenic animals that contain cells which express DNA encoding TAT. Methods for generating transgenic animals, particularly animals such as mice or rats, have become conventional in the art and are described, for example, in U.S. Pat. Nos. 4,736,866 and 4,870,009. Typically, particular cells would be targeted for TAT transgene incorporation with tissue-specific enhancers. Transgenic animals that include a copy of a transgene encoding TAT introduced into the germ line of the animal at an embryonic stage can be used to examine the effect of increased expression of DNA encoding TAT. Such animals can be used as tester animals for reagents thought to confer protection from, for example, pathological conditions associated with its overexpression. In accordance with this facet of the invention, an animal is treated with the reagent and a reduced incidence of the pathological condition, compared to untreated animals bearing the transgene, would indicate a potential therapeutic intervention for the pathological condition.

[0884] Alternatively, non-human homologues of TAT can be used to construct a TAT “knock out” animal which has a defective or altered gene encoding TAT as a result of homologous recombination between the endogenous gene encoding TAT and altered genomic DNA encoding TAT introduced into an embryonic stem cell of the animal. For example, cDNA encoding TAT can be used to clone genomic DNA encoding TAT in accordance with established techniques. A portion of the genomic DNA encoding TAT can be deleted or replaced with another gene, such as a gene encoding a selectable marker which can be used to monitor integration. Typically, several kilobases of unaltered flanking DNA (both at the 5′ and 3′ ends) are included in the vector [see e.g., Thomas and Capecchi, Cell, 51:503 (1987) for a description of homologous recombination vectors]. The vector is introduced into an embryonic stem cell line (e.g., by electroporation) and cells in which the introduced DNA has homologously recombined with the endogenous DNA are selected [see e.g., Li et al., Cell, 69:915 (1992)]. The selected cells are then injected into a blastocyst of an animal (e.g., a mouse or rat) to form aggregation chimeras [see e.g., Bradley, in Teratocarcinomas and Embryonic Stem Cells: A Practical Approach, E. J. Robertson, ed. (IRL, Oxford, 1987), pp. 113-152]. A chimeric embryo can then be implanted into a suitable pseudopregnant female foster animal and the embryo brought to term to create a “knock out” animal. Progeny harboring the homologously recombined DNA in their germ cells can be identified by standard techniques and used to breed animals in which all cells of the animal contain the homologously recombined DNA. Knockout animals can be characterized for instance, for their ability to defend against certain pathological conditions and for their development of pathological conditions due to absence of the TAT polypeptide.

[0885] Nucleic acid encoding the TAT polypeptides may also be used in gene therapy. In gene therapy applications, genes are introduced into cells in order to achieve in vivo synthesis of a therapeutically effective genetic product, for example for replacement of a defective gene. “Gene therapy” includes both conventional gene therapy where a lasting effect is achieved by a single treatment, and the administration of gene therapeutic agents, which involves the one time or repeated administration of a therapeutically effective DNA or mRNA. Antisense RNAs and DNAs can be used as therapeutic agents for blocking the expression of certain genes in vivo. It has already been shown that short antisense oligonucleotides can be imported into cells where they act as inhibitors, despite their low intracellular concentrations caused by their restricted uptake by the cell membrane. (Zamecnik et al., Proc. Natl. Acad. Sci. USA 83:4143-4146 (1986]). The oligonucleotides can be modified to enhance their uptake, e.g. by substituting their negatively charged phosphodiester groups by uncharged groups.

[0886] There are a variety of techniques available for introducing nucleic acids into viable cells. The techniques vary depending upon whether the nucleic acid is transferred into cultured cells in vitro, or in vivo in the cells of the intended host. Techniques suitable for the transfer of nucleic acid into mammalian cells in vitro include the use of liposomes, electroporation, microinjection, cell fusion, DEAE-dextran, the calcium phosphate precipitation method, etc. The currently preferred in vivo gene transfer techniques include transfection with viral (typically retroviral) vectors and viral coat protein-liposome mediated transfection (Dzau et al., Trends in Biotechnology 11, 205-210 [1993]). In some situations it is desirable to provide the nucleic acid source with an agent that targets the target cells, such as an antibody specific for a cell surface membrane protein or the target cell, a ligand for a receptor on the target cell, etc. Where liposomes are employed, proteins which bind to a cell surface membrane protein associated with endocytosis may be used for targeting and/or to facilitate uptake, e.g. capsid proteins or fragments thereof tropic for a particular cell type, antibodies for proteins which undergo internalization in cycling, proteins that target intracellular localization and enhance intracellular half-life. The technique of receptor-mediated endocytosis is described, for example, by Wu et al., J. Biol. Chem. 262, 4429-4432 (1987); and Wagner et al., Proc. Natl. Acad. Sci. USA 87, 3410-3414 (1990). For review of gene marking and gene therapy protocols see Anderson et al., Science 256, 808-813 (1992).

[0887] The nucleic acid molecules encoding the TAT polypeptides or fragments thereof described herein are useful for chromosome identification. In this regard, there exists an ongoing need to identify new chromosome markers, since relatively few chromosome marking reagents, based upon actual sequence data are presently available. Each TAT nucleic acid molecule of the present invention can be used as a chromosome marker.

[0888] The TAT polypeptides and nucleic acid molecules of the present invention may also be used diagnostically for tissue typing, wherein the TAT polypeptides of the present invention may be differentially expressed in one tissue as compared to another, preferably in a diseased tissue as compared to a normal tissue of the same tissue type. TAT nucleic acid molecules will find use for generating probes for PCR, Northern analysis, Southern analysis and Western analysis.

[0889] This invention encompasses methods of screening compounds to identify those that mimic the TAT polypeptide (agonists) or prevent the effect of the TAT polypeptide (antagonists). Screening assays for antagonist drug candidates are designed to identify compounds that bind or complex with the TAT polypeptides encoded by the genes identified herein, or otherwise interfere with the interaction of the encoded polypeptides with other cellular proteins, including e.g., inhibiting the expression of TAT polypeptide from cells. Such screening assays will include assays amenable to high-throughput screening of chemical libraries, making them particularly suitable for identifying small molecule drug candidates.

[0890] The assays can be performed in a variety of formats, including protein-protein binding assays, biochemical screening assays, immunoassays, and cell-based assays, which are well characterized in the art.

[0891] All assays for antagonists are common in that they call for contacting the drug candidate with a TAT polypeptide encoded by a nucleic acid identified herein under conditions and for a time sufficient to allow these two components to interact.

[0892] In binding assays, the interaction is binding and the complex formed can be isolated or detected in the reaction mixture. In a particular embodiment, the TAT polypeptide encoded by the gene identified herein or the drug candidate is immobilized on a solid phase, e.g., on a microtiter plate, by covalent or non-covalent attachments. Non-covalent attachment generally is accomplished by coating the solid surface with a solution of the TAT polypeptide and drying. Alternatively, an immobilized antibody, e.g., a monoclonal antibody, specific for the TAT polypeptide to be immobilized can be used to anchor it to a solid surface. The assay is performed by adding the non-immobilized component, which may be labeled by a detectable label, to the immobilized component, e.g., the coated surface containing the anchored component. When the reaction is complete, the non-reacted components are removed, e.g., by washing, and complexes anchored on the solid surface are detected. When the originally non-immobilized component carries a detectable label, the detection of label immobilized on the surface indicates that complexing occurred. Where the originally non-immobilized component does not carry a label, complexing can be detected, for example, by using a labeled antibody specifically binding the immobilized complex.

[0893] If the candidate compound interacts with but does not bind to a particular TAT polypeptide encoded by a gene identified herein, its interaction with that polypeptide can be assayed by methods well known for detecting protein-protein interactions. Such assays include traditional approaches, such as, e.g., cross-linking, co-immunoprecipitation, and co-purification through gradients or chromatographic columns. In addition, protein-protein interactions can be monitored by using a yeast-based genetic system described by Fields and co-workers (Fields and Song, Nature (London), 340:245-246 (1989); Chien et al., Proc. Natl. Acad. Sci. USA, 88:9578-9582 (1991)) as disclosed by Chevray and Nathans, Proc. Natl. Acad. Sci. USA, 89: 5789-5793 (1991). Many transcriptional activators, such as yeast GALA, consist of two physically discrete modular domains, one acting as the DNA-binding domain, the other one functioning as the transcription-activation domain. The yeast expression system described in the foregoing publications (generally referred to as the “two-hybrid system”) takes advantage of this property, and employs two hybrid proteins, one in which the target protein is fused to the DNA-binding domain of GAL4, and another, in which candidate activating proteins are fused to the activation domain. The expression of a GALL-lacZ reporter gene under control of a GAL4-activated promoter depends on reconstitution of GAL4 activity via protein-protein interaction. Colonies containing interacting polypeptides are detected with a chromogenic substrate for β-galactosidase. A complete kit (MATCHMAKER™) for identifying protein-protein interactions between two specific proteins using the two-hybrid technique is commercially available from Clontech. This system can also be extended to map protein domains involved in specific protein interactions as well as to pinpoint amino acid residues that are crucial for these interactions.

[0894] Compounds that interfere with the interaction of a gene encoding a TAT polypeptide identified herein and other intra- or extracellular components can be tested as follows: usually a reaction mixture is prepared containing the product of the gene and the intra- or extracellular component under conditions and for a time allowing for the interaction and binding of the two products. To test the ability of a candidate compound to inhibit binding, the reaction is run in the absence and in the presence of the test compound. In addition, a placebo may be added to a third reaction mixture, to serve as positive control. The binding (complex formation) between the test compound and the intra- or extracellular component present in the mixture is monitored as described hereinabove. The formation of a complex in the control reaction(s) but not in the reaction mixture containing the test compound indicates that the test compound interferes with the interaction of the test compound and its reaction partner.

[0895] To assay for antagonists, the TAT polypeptide may be added to a cell along with the compound to be screened for a particular activity and the ability of the compound to inhibit the activity of interest in the presence of the TAT polypeptide indicates that the compound is an antagonist to the TAT polypeptide. Alternatively, antagonists may be detected by combining the TAT polypeptide and a potential antagonist with membrane-bound TAT polypeptide receptors or recombinant receptors under appropriate conditions for a competitive inhibition assay. The TAT polypeptide can be labeled, such as by radioactivity, such that the number of TAT polypeptide molecules bound to the receptor can be used to determine the effectiveness of the potential antagonist. The gene encoding the receptor can be identified by numerous methods known to those of skill in the art, for example, ligand panning and FACS sorting. Coligan et al., Current Protocols in Immun., 1(2): Chapter 5 (1991). Preferably, expression cloning is employed wherein polyadenylated RNA is prepared from a cell responsive to the TAT polypeptide and a cDNA library created from this RNA is divided into pools and used to transfect COS cells or other cells that are not responsive to the TAT polypeptide. Transfected cells that are grown on glass slides are exposed to labeled TAT polypeptide. The TAT polypeptide can be labeled by a variety of means including iodination or inclusion of a recognition site for a site-specific protein kinase. Following fixation and incubation, the slides are subjected to autoradiographic analysis. Positive pools are identified and sub-pools are prepared and re-transfected using an interactive sub-pooling and re-screening process, eventually yielding a single clone that encodes the putative receptor.

[0896] As an alternative approach for receptor identification, labeled TAT polypeptide can be photoaffinity-linked with cell membrane or extract preparations that express the receptor molecule. Cross-linked material is resolved by PAGE and exposed to X-ray film. The labeled complex containing the receptor can be excised, resolved into peptide fragments, and subjected to protein micro-sequencing. The amino acid sequence obtained from micro-sequencing would be used to design a set of degenerate oligonucleotide probes to screen a cDNA library to identify the gene encoding the putative receptor.

[0897] In another assay for antagonists, mammalian cells or a membrane preparation expressing the receptor would be incubated with labeled TAT polypeptide in the presence of the candidate compound. The ability of the compound to enhance or block this interaction could then be measured.

[0898] More specific examples of potential antagonists include an oligonucleotide that binds to the fusions of immunoglobulin with TAT polypeptide, and, in particular, antibodies including, without limitation, poly- and monoclonal antibodies and antibody fragments, single-chain antibodies, anti-idiotypic antibodies, and chimeric or humanized versions of such antibodies or fragments, as well as human antibodies and antibody fragments. Alternatively, a potential antagonist may be a closely related protein, for example, a mutated form of the TAT polypeptide that recognizes the receptor but imparts no effect, thereby competitively inhibiting the action of the TAT polypeptide.

[0899] Another potential TAT polypeptide antagonist is an antisense RNA or DNA construct prepared using antisense technology, where, e.g., an antisense RNA or DNA molecule acts to block directly the translation of mRNA by hybridizing to targeted mRNA and preventing protein translation. Antisense technology can be used to control gene expression through triple-helix formation or antisense DNA or RNA, both of which methods are based on binding of a polynucleotide to DNA or RNA. For example, the 5′ coding portion of the polynucleotide sequence, which encodes the mature TAT polypeptides herein, is used to design an antisense RNA oligonucleotide of from about 10 to 40 base pairs in length. A DNA oligonucleotide is designed to be complementary to a region of the gene involved in transcription (triple helix—see Lee et al., Nucl. Acids Res., 6:3073 (1979); Cooney et al., Science, 241: 456 (1988); Dervan et al., Science, 251:1360 (1991)), thereby preventing transcription and the production of the TAT polypeptide. The antisense RNA oligonucleotide hybridizes to the mRNA in vivo and blocks translation of the mRNA molecule into the TAT polypeptide (antisense—Okano, Neurochem., 56:560 (1991); Oligodeoxynucleotides as Antisense Inhibitors of Gene Expression (CRC Press: Boca Raton, Fla., 1988). The oligonucleotides described above can also be delivered to cells such that the antisense RNA or DNA may be expressed in vivo to inhibit production of the TAT polypeptide. When antisense DNA is used, oligodeoxyribonucleotides derived from the translation-initiation site, e.g., between about −10 and +10 positions of the target gene nucleotide sequence, are preferred.

[0900] Potential antagonists include small molecules that bind to the active site, the receptor binding site, or growth factor or other relevant binding site of the TAT polypeptide, thereby blocking the normal biological activity of the TAT polypeptide. Examples of small molecules include, but are not limited to, small peptides or peptide-like molecules, preferably soluble peptides, and synthetic non-peptidyl organic or inorganic compounds.

[0901] Ribozymes are enzymatic RNA molecules capable of catalyzing the specific cleavage of RNA. Ribozymes act by sequence-specific hybridization to the complementary target RNA, followed by endonucleolytic cleavage. Specific ribozyme cleavage sites within a potential RNA target can be identified by known techniques. For further details see, e.g., Rossi, Current Biology, 4:469-471 (1994), and PCT publication No. WO 97/33551 (published Sep. 18, 1997).

[0902] Nucleic acid molecules in triple-helix formation used to inhibit transcription should be single-stranded and composed of deoxynucleotides. The base composition of these oligonucleotides is designed such that it promotes triple-helix formation via Hoogsteen base-pairing rules, which generally require sizeable stretches of purines or pyrimidines on one strand of a duplex. For further details see, e.g., PCT publication No. WO 97/33551, supra.

[0903] These small molecules can be identified by any one or more of the screening assays discussed hereinabove and/or by any other screening techniques well known for those skilled in the art.

[0904] Isolated TAT polypeptide-encoding nucleic acid can be used herein for recombinantly producing TAT polypeptide using techniques well known in the art and as described herein. In turn, the produced TAT polypeptides can be employed for generating anti-TAT antibodies using techniques well known in the art and as described herein.

[0905] Antibodies specifically binding a TAT polypeptide identified herein, as well as other molecules identified by the screening assays disclosed hereinbefore, can be administered for the treatment of various disorders, including cancer, in the form of pharmaceutical compositions.

[0906] If the TAT polypeptide is intracellular and whole antibodies are used as inhibitors, internalizing antibodies are preferred. However, lipofections or liposomes can also be used to deliver the antibody, or an antibody fragment, into cells. Where antibody fragments are used, the smallest inhibitory fragment that specifically binds to the binding domain of the target protein is preferred. For example, based upon the variable-region sequences of an antibody, peptide molecules can be designed that retain the ability to bind the target protein sequence. Such peptides can be synthesized chemically and/or produced by recombinant DNA technology. See, e.g., Marasco et al., Proc. Natl. Acad. Sci. USA, 90: 7889-7893 (1993).

[0907] The formulation herein may also contain more than one active compound as necessary for the particular indication being treated, preferably those with complementary activities that do not adversely affect each other. Alternatively, or in addition, the composition may comprise an agent that enhances its function, such as, for example, a cytotoxic agent, cytokine, chemotherapeutic agent, or growth-inhibitory agent. Such molecules are suitably present in combination in amounts that are effective for the purpose intended.

[0908] The following examples are offered for illustrative purposes only, and are not intended to limit the scope of the present invention in any way.

[0909] All patent and literature references cited in the present specification are hereby incorporated by reference in their entirety.

### EXAMPLES

[0910] Commercially available reagents referred to in the examples were used according to manufacturer's instructions unless otherwise indicated. The source of those cells identified in the following examples, and throughout the specification, by ATCC accession numbers is the American Type Culture Collection, Manassas, Va.

### EXAMPLE 1

### Tissue Expression Profiling Using GeneExpress®

[0911] A proprietary database containing gene expression information (GeneExpress®, Gene Logic Inc., Gaithersburg, Md.) was analyzed in an attempt to identify polypeptides (and their encoding nucleic acids) whose expression is significantly upregulated in a particular tumor tissue(s) of interest as compared to other tumor(s) and/or normal tissues. Specifically, analysis of the GeneExpress® database was conducted using either software available through Gene Logic Inc., Gaithersburg, Md., for use with the GeneExpress® database or with proprietary software written and developed at Genentech, Inc. for use with the GeneExpress® database. The rating of positive hits in the analysis is based upon several criteria including, for example, tissue specificity, tumor specificity and expression level in normal essential and/or normal proliferating tissues. The following is a list of molecules whose tissue expression profile as determined from an analysis of the GeneExpress® database evidences high tissue expression and significant upregulation of expression in a specific tumor or tumors as compared to other tumor(s) and/or normal tissues and optionally relatively low expression in normal essential and/or normal proliferating tissues. As such, the molecules listed below are excellent polypeptide targets for the diagnosis and therapy of cancer in mammals.

| | upregulation of | |
|---|---|---|
| Molecule | expression in: | as compared to: |
| DNA194607 (TAT319) | prostate tumor | normal prostate tissue |
| DNA225388 (TAT328) | prostate tumor | normal prostate tissue |
| DNA225388 (TAT328) | breast tumor | normal breast tissue |
| DNA261046 (TAT343) | breast tumor | normal breast tissue |
| DNA261046 (TAT343) | colon tumor | normal colon tissue |
| DNA261046 (TAT343) | lung tumor | normal lung tissue |
| DNA261046 (TAT343) | pancreas tumor | normal pancreas tissue |
| DNA261046 (TAT343) | ovarian tumor | normal ovarian tissue |
| DNA261046 (TAT343) | rectum tumor | normal rectum tissue |
| DNA261046 (TAT343) | skin tumor | normal skin tissue |
| DNA261046 (TAT343) | stomach tumor | normal stomach tissue |
| DNA261046 (TAT343) | prostate tumor | normal prostate tissue |
| DNA261046 (TAT343) | brain tumor | normal brain tissue |
| DNA261046 (TAT343) | esophagus tumor | normal esophagus tissue |
| DNA194036 (TAT345) | prostate tumor | normal prostate tissue |
| DNA225731 (TAT346) | prostate tumor | normal prostate tissue |
| DNA227996 (TAT348) | breast tumor | normal breast tissue |
| DNA227996 (TAT348) | colon tumor | normal colon tissue |
| DNA227996 (TAT348) | rectum tumor | normal rectum tissue |
| DNA227996 (TAT348) | uterine tumor | normal uterine tissue |
| DNA227996 (TAT348) | lung tumor | normal lung tissue |
| DNA227996 (TAT348) | ovarian tumor | normal ovarian tissue |
| DNA227996 (TAT348) | prostate tumor | normal prostate tissue |
| DNA227996 (TAT348) | pancreatic tumor | normal pancreatic tissue |
| DNA227996 (TAT348) | stomach tumor | normal stomach tissue |
| DNA227996 (TAT348) | bladder tumor | normal bladder tissue |
| DNA304652 (TAT353) | prostate tumor | normal prostate tissue |
| DNA254851 (TAT357) | skin tumor | normal skin tissue |
| DNA254851 (TAT357) | melanoma tumor | normal associated tissue |
| DNA39975 (TAT360) | bladder tumor | normal bladder tissue |
| DNA39975 (TAT360) | colon tumor | normal colon tissue |
| DNA39975 (TAT360) | rectum tumor | normal rectum tissue |
| DNA39975 (TAT360) | endometrial tumor | normal endometrial tissue |
| DNA39975 (TAT360) | lung tumor | normal lung tissue |
| DNA39975 (TAT360) | ovarian tumor | normal ovarian tissue |
| DNA39975 (TAT360) | stomach tumor | normal stomach tissue |
| DNA39975 (TAT360) | prostate tumor | normal prostate tissue |
| DNA39979 (TAT361) | colon tumor | normal colon tissue |
| DNA39979 (TAT361) | rectum tumor | normal bladder tissue |
| DNA39979 (TAT361) | endometrial tumor | normal endometrial tissue |
| DNA39979 (TAT361) | breast tumor | normal breast tissue |
| DNA39979 (TAT361) | ovarian tumor | normal ovarian tissue |
| DNA39979 (TAT361) | bladder tumor | normal bladder tissue |
| DNA39979 (TAT361) | prostate tumor | normal prostate tissue |
| DNA336539 (TAT363) | breast tumor | normal breast tissue |
| DNA336539 (TAT363) | colon tumor | normal colon tissue |
| DNA336539 (TAT363) | rectum tumor | normal rectum tissue |
| DNA336539 (TAT363) | endometrial tumor | normal endometrial tissue |
| DNA336539 (TAT363) | kidney tumor | normal kidney tissue |
| DNA336539 (TAT363) | lung tumor | normal lung tissue |
| DNA336539 (TAT363) | ovarian tumor | normal ovarian tissue |
| DNA336539 (TAT363) | pancreatic tumor | normal pancreatic tissue |
| DNA194909 (TAT365) | kidney tumor | normal kidney tissue |
| DNA271250 (TAT366) | lung tumor | normal lung tissue |
| DNA271250 (TAT366) | ovarian tumor | normal ovarian tissue |
| DNA271250 (TAT366) | bladder tumor | normal bladder tissue |
| DNA266520 (TAT369) | breast tumor | normal breast tissue |
| DNA327261 (TAT370) | colon tumor | normal colon tissue |
| DNA327261 (TAT370) | rectum tumor | normal rectum tissue |
| DNA226374 (TAT380) | lung tumor | normal lung tissue |
| DNA226374 (TAT380) | thyroid tumor | normal thyroid tissue |
| DNA226374 (TAT380) | prostate tumor | normal prostate tissue |
| DNA226374 (TAT380) | uterine tumor | normal uterine tissue |
| DNA226374 (TAT380) | adrenal tumor | normal adrenal tissue |
| DNA226374 (TAT380) | bone tumor | normal bone tissue |
| DNA226374 (TAT380) | esophageal tumor | normal esophageal tissue |
| DNA255788 (TAT381) | prostate tumor | normal prostate tissue |
| DNA255788 (TAT381) | ovarian tumor | normal ovarian tissue |
| DNA255788 (TAT381) | bladder tumor | normal bladder tissue |
| DNA327296 (TAT382) | uterine tumor | normal uterine tissue |
| DNA327296 (TAT382) | myeloid tumor | normal myeloid tissue |
| DNA327296 (TAT382) | ovarian tumor | normal ovarian tissue |
| DNA327296 (TAT382) | kidney tumor | normal kidney tissue |
| DNA327296 (TAT382) | prostate tumor | normal prostate tissue |
| DNA327296 (TAT382) | pancreatic tumor | normal pancreatic tissue |
| DNA327296 (TAT382) | thyroid tumor | normal thyroid tissue |
| DNA96970 (TAT383) | liver tumor | normal liver tissue |
| DNA96970 (TAT383) | soft tissue tumor | normal soft tissue |
| DNA96970 (TAT383) | kidney tumor | normal kidney tissue |
| DNA225790 (TAT384) | lung tumor | normal lung tissue |
| DNA225790 (TAT384) | breast tumor | normal breast tissue |
| DNA225790 (TAT384) | uterine tumor | normal uterine tissue |
| DNA225790 (TAT384) | pancreatic tumor | normal pancreatic tissue |
| DNA225790 (TAT384) | bladder tumor | normal bladder tissue |
| DNA225790 (TAT384) | esophageal tumor | normal esophageal tissue |
| DNA225790 (TAT384) | testis tumor | normal testis tissue |
| DNA225790 (TAT384) | colon tumor | normal colon tissue |
| DNA225790 (TAT384) | skin tumor | normal skin tissue |
| DNA225790 (TAT384) | ovarian tumor | normal ovarian tissue |
| DNA92958 (TAT385) | glioma | normal glial tissue |
| DNA92958 (TAT385) | brain tumor | normal brain tissue |
| DNA92958 (TAT385) | lung tumor | normal lung tissue |
| DNA257716 (TAT386) | adrenal tumor | normal adrenal tissue |
| DNA257716 (TAT386) | lung tumor | normal lung tissue |
| DNA226862 (TAT387) | brain tumor | normal brain tissue |
| DNA226862 (TAT387) | lung tumor | normal lung tissue |
| DNA226862 (TAT387) | breast tumor | normal breast tissue |
| DNA226862 (TAT387) | uterine tumor | normal uterine tissue |
| DNA226862 (TAT387) | soft tissue tumor | normal soft tissue |
| DNA226862 (TAT387) | colon tumor | normal colon tissue |
| DNA226862 (TAT387) | pancreatic tumor | normal pancreatic tissue |
| DNA226862 (TAT387) | ovarian tumor | normal ovarian tissue |
| DNA226862 (TAT387) | prostate tumor | normal prostate tissue |
| DNA226862 (TAT387) | testis tumor | normal testis tissue |
| DNA226862 (TAT387) | bone tumor | normal bone tissue |
| DNA226862 (TAT387) | kidney tumor | normal kidney tissue |
| DNA331165 (TAT388) | ovarian tumor | normal ovarian tissue |
| DNA331165 (TAT388) | small cell lung tumor | normal small cell lung tissue |
| DNA331167 (TAT389) | breast tumor | normal breast tissue |
| DNA331167 (TAT389) | pancreatic tumor | normal pancreatic tissue |
| DNA331167 (TAT389) | small cell lung tumor | normal small cell lung tissue |
| DNA331167 (TAT389) | lung tumor | normal lung tissue |
| DNA331173 (TAT390) | small cell lung tumor | normal small cell lung tissue |
| DNA331173 (TAT390) | lung tumor | normal lung tissue |
| DNA331171 (TAT391) | brain tumor | normal brain tissue |
| DNA331171 (TAT391) | small cell lung tumor | normal small cell lung tissue |
| DNA331171 (TAT391) | lung tumor | normal lung tissue |
| DNA226266 (TAT392) | glioma | normal glial/brain tissue |
| DNA226266 (TAT392) | lung tumor | normal lung tissue |
| DNA226266 (TAT392) | uterine tumor | normal uterine tissue |
| DNA226266 (TAT392) | ovarian tumor | normal ovarian tissue |
| DNA226266 (TAT392) | small cell lung tumor | normal small cell lung tissue |
| DNA226266 (TAT392) | pancreatic tumor | normal pancreatic tissue |
| DNA226266 (TAT392) | soft tissue tumor | normal soft tissue |
| DNA125753 (TAT396) | bone tumor | normal bone tissue |
| DNA125753 (TAT396) | breast tumor | Normal breast tissue |
| DNA125753 (TAT396) | endometrial tumor | normal endometrial tissue |
| DNA125753 (TAT396) | kidney tumor | normal kidney tissue |
| DNA125753 (TAT396) | lung tumor | normal lung tissue |
| DNA125753 (TAT396) | ovarian tumor | normal ovarian tissue |
| DNA125753 (TAT396) | testis tumor | normal testis tissue |
| DNA125753 (TAT396) | skin tumor | normal skin tissue |
| DNA125753 (TAT396) | soft tissue tumor | normal soft tissue |
| DNA199793 (TAT397) | breast tumor | normal breast tissue |
| DNA199793 (TAT397) | lung tumor | normal lung tissue |
| DNA199793 (TAT397) | ovarian tumor | normal ovarian tissue |
| DNA199793 (TAT397) | prostate tumor | normal prostate tissue |
| DNA210647 (TAT398) | neuroendocrine tumor | normal neuroendocrine tissue |
| DNA210647 (TAT398) | adrenal tumor | normal adrenal tissue |
| DNA210647 (TAT398) | sarcomas | normal associated tissue |
| DNA210647 (TAT398) | lung tumor | normal lung tissue |
| DNA210647 (TAT398) | lymphoid tumor | normal lymphoid tissue |
| DNA210647 (TAT398) | soft tissue tumor | normal soft tissue |
| DNA332801 (TAT427) | neuroendocrine tumor | normal neuroendocrine tissue |
| DNA332801 (TAT427) | adrenal tumor | normal adrenal tissue |
| DNA332801 (TAT427) | sarcomas | normal associated tissue |
| DNA332801 (TAT427) | lung tumor | normal lung tissue |
| DNA332801 (TAT427) | lymphoid tumor | normal lymphoid tissue |
| DNA332801 (TAT427) | soft tissue tumor | normal soft tissue |
| DNA226884 (TAT399) | breast tumor | normal breast tissue |
| DNA226884 (TAT399) | endometrial tumor | normal endometrial tissue |
| DNA226884 (TAT399) | kidney tumor | normal kidney tissue |
| DNA226884 (TAT399) | lung tumor | normal lung tissue |
| DNA226884 (TAT399) | small cell lung tumor | normal lung tissue |
| DNA226884 (TAT399) | ovarian tumor | normal ovarian tissue |
| DNA226884 (TAT399) | soft tissue tumor | normal soft tissue |
| DNA335916 (TAT423) | breast tumor | normal breast tissue |
| DNA335916 (TAT423) | endometrial tumor | normal endometrial tissue |
| DNA335916 (TAT423) | kidney tumor | normal kidney tissue |
| DNA335916 (TAT423) | lung tumor | normal lung tissue |
| DNA335916 (TAT423) | small cell lung tumor | normal lung tissue |
| DNA335916 (TAT423) | ovarian tumor | normal ovarian tissue |
| DNA335916 (TAT423) | soft tissue tumor | normal soft tissue |

### EXAMPLE 2

### Microarray Analysis to Detect Upregulation of TAT Polypeptides in Cancerous Tumors Using Laser Capture Microdissection

[0912] Nucleic acid microarrays, often containing thousands of gene sequences, are useful for identifying differentially expressed genes in diseased tissues as compared to their normal counterparts. Using nucleic acid microarrays, test and control mRNA samples from test and control tissue samples are reverse transcribed and labeled to generate cDNA probes. The cDNA probes are then hybridized to an array of nucleic acids immobilized on a solid support. The array is configured such that the sequence and position of each member of the array is known. For example, a selection of genes known to be expressed in certain disease states may be arrayed on a solid support. Hybridization of a labeled probe with a particular array member indicates that the sample from which the probe was derived expresses that gene. If the hybridization signal of a probe from a test (disease tissue) sample is greater than hybridization signal of a probe from a control (normal tissue) sample, the gene or genes overexpressed in the disease tissue are identified. The implication of this result is that an overexpressed protein in a diseased tissue is useful not only as a diagnostic marker for the presence of the disease condition, but also as a therapeutic target for treatment of the disease condition.

[0913] The methodology of hybridization of nucleic acids and microarray technology is well known in the art. In one example, the specific preparation of nucleic acids for hybridization and probes, slides, and hybridization conditions are all detailed in PCT Patent Application Serial No. PCT/US01/10482, filed on Mar. 30, 2001 and which is herein incorporated by reference.

[0914] In the present example, laser capture microdissected (LCM) cancerous tumors derived from various human tissues were studied for upregulated gene expression relative to cancerous tumors from different tissue types and/or non-cancerous human tissues in an attempt to identify those polypeptides which are overexpressed in a particular cancerous tumor(s). In certain experiments, LCM cancerous human tumor tissue and non-cancerous human tumor tissue of the same tissue type (often from the same patient) were obtained and analyzed for TAT polypeptide expression. Additionally, LCM cancerous human tumor tissue from any of a variety of different human tumors was obtained and compared to a “universal” epithelial control sample which was prepared by pooling non-cancerous human tissues of epithelial origin, including liver, kidney, and lung. mRNA isolated from the pooled tissues represents a mixture of expressed gene products from these different tissues. Microarray hybridization experiments using the pooled control samples generated a linear plot in a 2-color analysis. The slope of the line generated in a 2-color analysis was then used to normalize the ratios of (test:control detection) within each experiment. The normalized ratios from various experiments were then compared and used to identify clustering of gene expression. Thus, the pooled “universal control” sample not only allowed effective relative gene expression determinations in a simple 2-sample comparison, it also allowed multi-sample comparisons across several experiments.

[0915] In the present experiments, nucleic acid probes derived from the herein described TAT polypeptide-encoding nucleic acid sequences were used in the creation of the microarray and RNA from various LCM tumor tissues were used for the hybridization thereto. Below is shown the results of these experiments, demonstrating that various TAT polypeptides of the present invention are significantly overexpressed in various LCM human tumor tissues as compared to their normal counterpart tissue(s). Moreover, all of the molecules shown below are significantly overexpressed in their specific tumor cell(s) as compared to in the “universal” epithelial control. As described above, these data demonstrate that the TAT polypeptides of the present invention are useful not only as diagnostic markers for the presence of one or more cancerous tumors, but also serve as therapeutic targets for the treatment of those tumors.

| | upregulation of | |
|---|---|---|
| Molecule | expression in: | as compared to: |
| DNA336539 (TAT363) | breast tumor | normal breast tissue |
| DNA336539 (TAT363) | prostate tumor | normal prostate tissue |
| DNA336539 (TAT363) | lung tumor | normal lung tissue |
| DNA336539 (TAT363) | ovarian tumor | normal ovarian tissue |
| DNA336539 (TAT363) | colon tumor | normal colon tissue |

### EXAMPLE 3

### Quantitative Analysis of TAT mRNA Expression

[0916] In this assay, a 5′ nuclease assay (for example, TaqMan®) and real-time quantitative PCR (for example, ABI Prizm 7700 Sequence Detection System® (Perkin Elmer, Applied Biosystems Division, Foster City, Calif.)), were used to find genes that are significantly overexpressed in a cancerous tumor or tumors as compared to other cancerous tumors or normal non-cancerous tissue. The 5′ nuclease assay reaction is a fluorescent PCR-based technique which makes use of the 5′ exonuclease activity of Taq DNA polymerase enzyme to monitor gene expression in real time. Two oligonucleotide primers (whose sequences are based upon the gene or EST sequence of interest) are used to generate an amplicon typical of a PCR reaction. A third oligonucleotide, or probe, is designed to detect nucleotide sequence located between the two PCR primers. The probe is non-extendible by Taq DNA polymerase enzyme, and is labeled with a reporter fluorescent dye and a quencher fluorescent dye. Any laser-induced emission from the reporter dye is quenched by the quenching dye when the two dyes are located close together as they are on the probe. During the PCR amplification reaction, the Taq DNA polymerase enzyme cleaves the probe in a template-dependent manner. The resultant probe fragments disassociate in solution, and signal from the released reporter dye is free from the quenching effect of the second fluorophore. One molecule of reporter dye is liberated for each new molecule synthesized, and detection of the unquenched reporter dye provides the basis for quantitative interpretation of the data.

[0917] The 5′ nuclease procedure is run on a real-time quantitative PCR device such as the ABI Prism 7700TM Sequence Detection. The system consists of a thermocycler, laser, charge-coupled device (CCD) camera and computer. The system amplifies samples in a 96-well format on a thermocycler. During amplification, laser-induced fluorescent signal is collected in real-time through fiber optics cables for all 96 wells, and detected at the CCD. The system includes software for running the instrument and for analyzing the data.

[0918] The starting material for the screen was mRNA isolated from a variety of different cancerous tissues. The mRNA is quantitated precisely, e.g., fluorometrically. As a negative control, RNA was isolated from various normal tissues of the same tissue type as the cancerous tissues being tested.

[0919] 5′ nuclease assay data are initially expressed as Ct, or the threshold cycle. This is defined as the cycle at which the reporter signal accumulates above the background level of fluorescence. The ACt values are used as quantitative measurement of the relative number of starting copies of a particular target sequence in a nucleic acid sample when comparing cancer mRNA results to normal human mRNA results. As one Ct unit corresponds to 1 PCR cycle or approximately a 2-fold relative increase relative to normal, two units corresponds to a 4-fold relative increase, 3 units corresponds to an 8-fold relative increase and so on, one can quantitatively measure the relative fold increase in mRNA expression between two or more different tissues. Using this technique, the molecules listed below have been identified as being significantly overexpressed (i.e., at least 2 fold) in a particular tumor(s) as compared to their normal non-cancerous counterpart tissue(s) (from both the same and different tissue donors) and thus, represent excellent polypeptide targets for the diagnosis and therapy of cancer in mammals.

| | upregulation of | |
|---|---|---|
| Molecule | expression in: | as compared to: |
| DNA194607 (TAT319) | prostate tumor | normal prostate tissue |
| DNA225388 (TAT328) | prostate tumor | normal prostate tissue |
| DNA261046 (TAT343) | breast tumor | normal breast tissue |
| DNA194036 (TAT345) | prostate tumor | normal prostate tissue |
| DNA225731 (TAT346) | prostate tumor | Normal prostate tissue |
| DNA227996 (TAT348) | prostate tumor | normal prostate tissue |
| DNA304652 (TAT353) | prostate tumor | normal prostate tissue |
| DNA304766 (TAT354) | breast tumor | normal breast tissue |
| DNA304767 (TAT355) | prostate tumor | normal prostate tissue |
| DNA304987 (TAT359) | breast tumor | normal breast tissue |
| DNA39975 (TAT360) | colon tumor | normal colon tissue |
| DNA39979 (TAT361) | breast tumor | normal breast tissue |
| DNA336539 (TAT363) | breast tumor | normal breast tissue |
| DNA336539 (TAT363) | squamous cell | normal squamous cell lung |
| | lung tumor | tissue |
| DNA194909 (TAT365) | kidney tumor | normal kidney tissue |
| DNA271250 (TAT366) | ovarian tumor | normal ovarian tissue |
| DNA266520 (TAT369) | breast tumor | normal breast tissue |
| DNA327261 (TAT370) | colon tumor | normal colon tissue |
| DNA225790 (TAT384) | lung tumor | normal lung tissue |
| DNA226862 (TAT387) | ovarian tumor | normal ovarian tissue |

### EXAMPLE 4

### In Situ Hybridization

[0920] In situ hybridization is a powerful and versatile technique for the detection and localization of nucleic acid sequences within cell or tissue preparations. It may be useful, for example, to identify sites of gene expression, analyze the tissue distribution of transcription, identify and localize viral infection, follow changes in specific mRNA synthesis and aid in chromosome mapping.

[0921] In situ hybridization was performed following an optimized version of the protocol by Lu and Gillett, Cell Vision 1: 169-176 (1994), using PCR-generated ³³P-labeled riboprobes. Briefly, formalin-fixed, paraffin-embedded human tissues were sectioned, deparaffinized, deproteinated inproteinase K (20 g/ml) for 15 minutes at 37° C., and further processed for in situ hybridization as described by Lu and Gillett, supra. A [³³-P] UTP-labeled antisense riboprobe was generated from a PCR product and hybridized at 55° C. overnight. The slides were dipped in Kodak NTB2 nuclear track emulsion and exposed for 4 weeks.

[0922] ³³P-Riboprobe Synthesis

[0923] 6.0 μl (125 mCi) of ³³P-UTP (Amersham BF 1002, SA<2000 Ci/mmol) were speed vac dried. To each tube containing dried ³³P-UTP, the following ingredients were added:

[0924] 2.0 μl 5× transcription buffer

[0925] 1.0 μl DTT (100 mM)

[0926] 2.0 μl NTP mix (2.5 mM: 10μ; each of 10 mM GTP, CTP & ATP+10 μl H₂O)

[0927] 1.0 μl UTP (50 μM)

[0928] 1.0 μl Rnasin

[0929] 1.0 μl DNA template (1 μg)

[0930] 1.0 μl H₂O

[0931] 1.0 μl RNA polymerase (for PCR products T3=AS, T7=S, usually)

[0932] The tubes were incubated at 37° C. for one hour. 1.0 μl RQ1 DNase were added, followed by incubation at 37° C. for 15 minutes. 90 μl TE (10 mM Tris pH 7.6/1 mM EDTA pH 8.0) were added, and the mixture was pipetted onto DE81 paper. The remaining solution was loaded in a Microcon-50 ultrafiltration unit, and spun using program 10 (6 minutes). The filtration unit was inverted over a second tube and spun using program 2 (3 minutes). After the final recovery spin, 100 μl TE were added. 1 μl of the final product was pipetted on DE81 paper and counted in 6 ml of Biofluor II.

[0933] The probe was run on a TBE/urea gel. 1-3 μl of the probe or 5 μl of RNA Mrk III were added to 3 μl of loading buffer. After heating on a 95° C. heat block for three minutes, the probe was immediately placed on ice. The wells of gel were flushed, the sample loaded, and run at 180-250 volts for 45 minutes. The gel was wrapped in saran wrap and exposed to XAR film with an intensifying screen in −70° C. freezer one hour to overnight.

[0934] ³³P-Hybridization

[0935] A. Pretreatment of Frozen Sections

[0936] The slides were removed from the freezer, placed on aluminium trays and thawed at room temperature for 5 minutes. The trays were placed in 55° C. incubator for five minutes to reduce condensation. The slides were fixed for 10 minutes in 4% paraformaldehyde on ice in the fume hood, and washed in 0.5×SSC for 5 minutes, at room temperature (25 ml 20×SSC+975 ml SQ H₂O). After deproteination in 0.5 μg/ml proteinase K for 10 minutes at 37° C. (12.5 μl of 10 mg/ml stock in 250 ml prewarmed RNase-free RNAse buffer), the sections were washed in 0.5×SSC for 10 minutes at room temperature. The sections were dehydrated in 70%, 95%, 100% ethanol, 2 minutes each.

[0937] B. Pretreatment of Paraffin-Embedded Sections

[0938] The slides were deparaffinized, placed in SQ H₂O, and rinsed twice in 2×SSC at room temperature, for 5 minutes each time. The sections were deproteinated in 20 μg/ml proteinase K (500 μl of 10 mg/ml in 250 ml RNase-free RNase buffer; 37° C., 15 minutes)—human embryo, or 8× proteinase K (100 μl in 250 ml Rnase buffer, 37° C., 30 minutes)—formalin tissues. Subsequent rinsing in 0.5×SSC and dehydration were performed as described above.

[0939] C. Prehybridization

[0940] The slides were laid out in a plastic box lined with Box buffer (4×SSC, 50% formamide)—saturated filter paper.

[0941] D. Hybridization

[0942] 1.0×10⁶ cpm probe and 1.0 μl tRNA (50 mg/ml stock) per slide were heated at 95° C. for 3 minutes. The slides were cooled on ice, and 48 μl hybridization buffer were added per slide. After vortexing, 50 μl ³³P mix were added to 50 μl prehybridization on slide. The slides were incubated overnight at 55° C.

[0943] E. Washes

[0944] Washing was done 2×10 minutes with 2×SSC, EDTA at room temperature (400 ml 20×SSC+16 ml 0.25M EDTA, V_{f}=4L), followed by RNaseA treatment at 37° C. for 30 minutes (500 μl of 10 mg/ml in 250 ml Rnase buffer=20 μg/ml), The slides were washed 2×10 minutes with 2×SSC, EDTA at room temperature. The stringency wash conditions were as follows: 2 hours at 55° C., 0.1×SSC, EDTA (20 ml 20×SSC+16 ml EDTA, V_{f}=4L).

[0945] F. Oligonucleotides

[0946] In situ analysis was performed on a variety of DNA sequences disclosed herein. The oligonucleotides employed for these analyses were obtained so as to be complementary to the nucleic acids (or the complements thereof) as shown in the accompanying figures.

[0947] G. Results

[0948] In situ analysis was performed on a variety of DNA sequences disclosed herein. The results from these analyses are as follows.

[0949] (1) DNA194607 (TAT319)

[0950] The expression of this gene appears epithelial-specific. Strong expression is seen in benign and malignant prostatic epithelium (3 of 3 cases), as well as in a LnCaP xenograft.

[0951] (2) DNA225388 (TAT328)

[0952] In an analysis of normal tissues, prostatic epithelium is the only tissue with a positive signal. In a separate analysis, 12/17 metastatic and 20/25 primary prostate cancers are positive. In a third analysis, 1/1 prostatic adenocarcinoma gives a moderately strong signal, all other neoplasms are negative. Finally, in an analysis of prostate cancer xenograft TMA, 11 of 17 xenograft models are positive.

[0953] (3) DNA194036 (TAT345)

[0954] Strong expression is observed in 2/3 colorectal cancer samples, 1/1 prostate cancer sample, 3/3 endometrial cancer samples, 2/3 transitional cell carcinoma samples, 3/3 non-small cell lung carcinoma samples, 1/1 pancreatic cancer sample, and in 2/3 malignant melanoma samples.

[0955] In an independent analysis, strong expression is also observed in 12/15 metastatic and 25/26 primary prostate cancer samples. Expression is limited to the epithelial cells and expression levels are extremely strong in most samples.

[0956] In yet another independent analysis, strong expression is observed in the LnCaP cells in 17 of 17 prostate cancer xenograft models, wherein the expression in these cells is very strong.

[0957] In yet another independent analysis, strong expression is observed in 10 of 11 colon cancer samples, 5 of 6 stomach cancer samples, 7 of 9 metastatic adenocarcinoma samples, 2 of 2 cholangiocarcinoma samples, and 4 of 4 esophageal carcinoma samples.

[0958] With regard to expression in normal tissues, limited expression is observed in epithelial cells of the prostate, small and large intestine, stomach, breast, distal renal tubules, epidermis, and in testicular germ cells. The expression is strongest in normal prostate tissue as compared to all other normal tissues tested. All other normal tissues tested are negative for expression.

[0959] (4) DNA304652 (TAT353)

[0960] Strong expression is observed in 2/3 colorectal cancer samples, 1/1 prostate cancer sample, 3/3 endometrial cancer samples, 2/3 transitional cell carcinoma samples, 3/3 non-small cell lung carcinoma samples, 1/1 pancreatic cancer sample, and in 2/3 malignant melanoma samples.

[0961] In an independent analysis, strong expression is also observed in 12/15 metastatic and 25/26 primary prostate cancer samples. Expression is limited to the epithelial cells and expression levels are extremely strong in most samples.

[0962] In yet another independent analysis, strong expression is observed in the LnCaP cells in 17 of 17 prostate cancer xenograft models, wherein the expression in these cells is very strong.

[0963] In yet another independent analysis, strong expression is observed in 10 of 11 colon cancer samples, 5 of 6 stomach cancer samples, 7 of 9 metastatic adenocarcinoma samples, 2 of 2 cholangiocarcinoma samples, and 4 of 4 esophageal carcinoma samples.

[0964] With regard to expression in normal tissues, limited expression is observed in epithelial cells of the prostate, small and large intestine, stomach, breast, distal renal tubules, epidermis, and in testicular germ cells. The expression is strongest in normal prostate tissue as compared to all other normal tissues tested. All other normal tissues tested are negative for expression.

[0965] (5) DNA225731 (TAT346)

[0966] In one analysis, strong expression is observed in 18 of 18 primary prostate cancer samples. Additionally, 12 of 15 metastatic prostate cancer samples are positive for expression.

[0967] In an independent analysis, 17 of 18 primary prostate cancer samples are positive for expression. Additionally, 4 of 7 metastatic prostate cancers are positive for expression.

[0968] For expression in normal tissues, expression is seen in prostate epithelium, cortical neurons and breast epithelium; a positive signal is also observed in colon and small intestinal mucosa (epithelium and lamina propria), ovarian stroma, testicular germ cells, peripheral nerve, pancreas and epidermis.

[0969] (6) DNA227996 (TAT348)

[0970] In one analysis, 18 of 18 primary prostate cancer samples are positive for expression, wherein 17 of the 18 samples tested show a very strong expression level. Additionally, 15 of 16 metastatic prostate cancer samples are positive for expression.

[0971] In an independent analysis, 19 of 24 primary prostate cancer samples are positive for expression. Also, 9 of 12 metastatic prostate cancer samples are positive for expression.

[0972] In yet another independent analysis, 11 of 35 lung adenocarcinoma samples show a positive signal, and 10 of 27 lung squamous cell carcinoma samples are positive for expression.

[0973] With regard to expression in normal tissues, a positive signal of moderate intensity is seen in prostate epithelium, mammary epithelium and colon mucosa. All other normal tissues tested are negative for expression.

[0974] (7) DNA254851 (TAT357)

[0975] All malignant melanoma samples tested are strongly positive for expression. All normal tissues tested, including three normal skin samples, are negative for expression.

[0976] (8) DNA194909 (TAT365)

[0977] Seventeen of 33 renal cell carcinoma samples are positive for expression, whereas all normal tissues tested, including benign kidney tissue, is negative.

[0978] (9) DNA271250 (TAT366)

[0979] All normal tissues tested, including normal endometrial and ovarian tissues, are negative for expression. Conversely, 2 of 3 transitional cell carcinoma samples show a moderate to strong signal, 2 of 2 ovarian carcinoma samples show positive expression, and 1 of 2 endometrial adenocarcinoma samples are positive for expression.

[0980] (10) DNA266520 (TAT369)

[0981] A strong signal is observed in 1 of 1 non-small cell lung carcinoma sample and 1 of 1 pheochromocytoma. All normal tissues tested were negative for expression.

### EXAMPLE 5

### Verification and Analysis of Differential TAT Polypeptide Expression by GEPIS

[0982] TAT polypeptides which may have been identified as a tumor antigen as described in one or more of the above Examples were analyzed and verified as follows. An expressed sequence tag (EST) DNA database (LIFESEQ®, Incyte Pharmaceuticals, Palo Alto, Calif.) was searched and interesting EST sequences were identified by GEPIS. Gene expression profiling in silico (GEPIS) is a bioinformatics tool developed at Genentech, Inc. that characterizes genes of interest for new cancer therapeutic targets. GEPIS takes advantage of large amounts of EST sequence and library information to determine gene expression profiles. GEPIS is capable of determining the expression profile of a gene based upon its proportional correlation with the number of its occurrences in EST databases, and it works by integrating the LIFESEQ® EST relational database and Genentech proprietary information in a stringent and statistically meaningful way. In this example, GEPIS is used to identify and cross-validate novel tumor antigens, although GEPIS can be configured to perform either very specific analyses or broad screening tasks. For the initial screen, GEPIS is used to identify EST sequences from the LIFESEQ® database that correlate to expression in a particular tissue or tissues of interest (often a tumor tissue of interest). The EST sequences identified in this initial screen (or consensus sequences obtained from aligning multiple related and overlapping EST sequences obtained from the initial screen) were then subjected to a screen intended to identify the presence of at least one transmembrane domain in the encoded protein. Finally, GEPIS was employed to generate a complete tissue expression profile for the various sequences of interest. Using this type of screening bioinformatics, various TAT polypeptides (and their encoding nucleic acid molecules) were identified as being significantly overexpressed in a particular type of cancer or certain cancers as compared to other cancers and/or normal non-cancerous tissues. The rating of GEPIS hits is based upon several criteria including, for example, tissue specificity, tumor specificity and expression level in normal essential and/or normal proliferating tissues. The following is a list of molecules whose tissue expression profile as determined by GEPIS evidences high tissue expression and significant upregulation of expression in a specific tumor or tumors as compared to other tumor(s) and/or normal tissues and optionally relatively low expression in normal essential and/or normal proliferating tissues. As such, the molecules listed below are excellent polypeptide targets for the diagnosis and therapy of cancer in mammals.

| | upregulation of | |
|---|---|---|
| Molecule | expression in: | as compared to: |
| DNA103367 (TAT306) | liver tumor | normal liver tissue |
| DNA108628 (TAT307) | colon tumor | normal colon tissue |
| DNA108720 (TAT308) | kidney tumor | normal kidney tissue |
| DNA111260 (TAT309) | prostate tumor | normal prostate tissue |
| DNA111260 (TAT309) | bladder tumor | normal bladder tissue |
| DNA150051 (TAT310) | colon tumor | normal colon tissue |
| DNA150051 (TAT310) | ovarian tumor | normal ovarian tissue |
| DNA150576 (TAT311) | liver tumor | normal liver tissue |
| DNA150655 (TAT312) | prostate tumor | normal prostate tissue |
| DNA151242 (TAT313) | breast tumor | normal breast tissue |
| DNA151475 (TAT314) | kidney tumor | normal kidney tissue |
| DNA170028 (TAT315) | breast tumor | normal breast tissue |
| DNA170028 (TAT315) | ovarian tumor | normal ovarian tissue |
| DNA170028 (TAT315) | brain tumor | normal brain tissue |
| DNA170028 (TAT315) | lung tumor | normal lung tissue |
| DNA170028 (TAT315) | adrenal gland tumor | normal adrenal gland tissue |
| DNA170036 (TAT316) | colon tumor | normal colon tissue |
| DNA170036 (TAT316) | uterine tumor | normal uterine tissue |
| DNA170036 (TAT316) | stomach tumor | normal stomach tissue |
| DNA170036 (TAT316) | breast tumor | normal breast tissue |
| DNA226549 (TAT317) | myeloid tumor | normal myeloid tissue |
| DNA226549 (TAT317) | uterine tumor | normal uterine tissue |
| DNA226549 (TAT317) | ovarian tumor | normal ovarian tissue |
| DNA226549 (TAT317) | lung tumor | normal lung tissue |
| DNA193850 (TAT318) | breast tumor | normal breast tissue |
| DNA193850 (TAT318) | ovarian tumor | normal ovarian tissue |
| DNA193850 (TAT318) | lung tumor | normal lung tissue |
| DNA194607 (TAT319) | prostate tumor | normal prostate tissue |
| DNA196615 (TAT320) | uterine tumor | normal uterine tissue |
| DNA196615 (TAT320) | ovarian tumor | normal ovarian tissue |
| DNA199062 (TAT321) | prostate tumor | normal prostate tissue |
| DNA220776 (TAT322) | breast tumor | normal breast tissue |
| DNA254783 (TAT323) | colon tumor | normal colon tissue |
| DNA254783 (TAT323) | myeloid tumor | normal myeloid tissue |
| DNA220980 (TAT324) | ovarian tumor | normal ovarian tissue |
| DNA220980 (TAT324) | lung tumor | normal lung tissue |
| DNA254898 (TAT325) | lung tumor | normal lung tissue |
| DNA254898 (TAT325) | uterine tumor | normal uterine tissue |
| DNA256257 (TAT326) | lung tumor | normal lung tissue |
| DNA222801 (TAT327) | lung tumor | normal lung tissue |
| DNA225388 (TAT328) | prostate tumor | normal prostate tissue |
| DNA226421 (TAT329) | uterine tumor | normal uterine tissue |
| DNA226421 (TAT329) | stomach tumor | normal stomach tissue |
| DNA228521 (TAT330) | breast tumor | normal breast tissue |
| DNA228521 (TAT330) | prostate tumor | normal prostate tissue |
| DNA233286 (TAT331) | breast tumor | normal breast tissue |
| DNA45493 (TAT332) | colon tumor | normal colon tissue |
| DNA59608 (TAT333) | brain tumor | normal brain tissue |
| DNA62872 (TAT334) | breast tumor | normal breast tissue |
| DNA76533 (TAT335) | lung tumor | normal lung tissue |
| DNA84932 (TAT336) | adrenal gland tumor | normal adrenal gland tissue |
| DNA84932 (TAT336) | lung tumor | normal lung tissue |
| DNA84932 (TAT336) | breast tumor | normal breast tissue |
| DNA88045 (TAT337) | prostate tumor | normal prostate tissue |
| DNA88232 (TAT338) | liver tumor | normal liver tissue |
| DNA88232 (TAT338) | pancreatic tumor | normal pancreatic tissue |
| DNA88237 (TAT339) | uterine tumor | normal uterine tissue |
| DNA88237 (TAT339) | breast tumor | normal breast tissue |
| DNA88334 (TAT340) | uterine tumor | normal uterine tissue |
| DNA88334 (TAT340) | ovarian tumor | normal ovarian tissue |
| DNA88411 (TAT341) | breast tumor | normal breast tissue |
| DNA88411 (TAT341) | bone tumor | normal bone tissue |
| DNA88431 (TAT342) | breast tumor | normal breast tissue |
| DNA88431 (TAT342) | ovarian tumor | normal ovarian tissue |
| DNA88431 (TAT342) | lung tumor | normal lung tissue |
| DNA88431 (TAT342) | pancreatic tumor | normal pancreatic tissue |
| DNA88431 (TAT342) | bladder tumor | normal bladder tissue |
| DNA261046 (TAT343) | breast tumor | normal breast tissue |
| DNA261046 (TAT343) | colon tumor | normal colon tissue |
| DNA261046 (TAT343) | lung tumor | normal lung tissue |
| DNA261046 (TAT343) | pancreas tumor | normal pancreas tissue |
| DNA261046 (TAT343) | ovarian tumor | normal ovarian tissue |
| DNA261046 (TAT343) | rectum tumor | normal rectum tissue |
| DNA261046 (TAT343) | skin tumor | normal skin tissue |
| DNA261046 (TAT343) | stomach tumor | normal stomach tissue |
| DNA261046 (TAT343) | prostate tumor | normal prostate tissue |
| DNA261046 (TAT343) | brain tumor | normal brain tissue |
| DNA261046 (TAT343) | esophagus tumor | normal esophagus tissue |
| DNA182432 (TAT344) | uterine tumor | normal uterine tissue |
| DNA182432 (TAT344) | lung tumor | normal lung tissue |
| DNA182432 (TAT344) | breast tumor | normal breast tissue |
| DNA182432 (TAT344) | brain tumor | normal brain tissue |
| DNA182432 (TAT344) | lymphoid tumor | normal lymphoid tissue |
| DNA194036 (TAT345) | prostate tumor | normal prostate tissue |
| DNA194036 (TAT345) | bladder tumor | normal bladder tissue |
| DNA194036 (TAT345) | pancreatic tumor | normal pancreatic tissue |
| DNA225731 (TAT346) | prostate tumor | normal prostate tissue |
| DNA227996 (TAT348) | bone tumor | normal bone tissue |
| DNA227996 (TAT348) | colon tumor | normal colon tissue |
| DNA227996 (TAT348) | prostate tumor | normal prostate tissue |
| DNA227996 (TAT348) | pancreatic tumor | normal pancreatic tissue |
| DNA304652 (TAT353) | prostate tumor | normal prostate tissue |
| DNA304652 (TAT353) | bladder tumor | normal bladder tissue |
| DNA304652 (TAT353) | pancreatic tumor | normal pancreatic tissue |
| DNA304766 (TAT354) | breast tumor | normal breast tissue |
| DNA304766 (TAT354) | colon tumor | normal colon tissue |
| DNA304766 (TAT354) | rectum tumor | normal rectum tissue |
| DNA304766 (TAT354) | prostate tumor | normal prostate tissue |
| DNA304767 (TAT355) | colon tumor | normal colon tissue |
| DNA304767 (TAT355) | kidney tumor | normal kidney tissue |
| DNA304767 (TAT355) | prostate tumor | normal prostate tissue |
| DNA136821 (TAT356) | prostate tumor | normal prostate tissue |
| DNA254851 (TAT357) | skin tumor | normal skin tissue |
| DNA254851 (TAT357) | lymphoid tumor | normal lymphoid tissue |
| DNA254851 (TAT357) | prostate tumor | normal prostate tissue |
| DNA47361 (TAT358) | lymphoid tumor | normal lymphoid tissue |
| DNA47361 (TAT358) | pancreatic tumor | normal pancreatic tissue |
| DNA47361 (TAT358) | lung tumor | normal lung tissue |
| DNA304987 (TAT359) | breast tumor | normal breast tissue |
| DNA39975 (TAT360) | lung tumor | normal lung tissue |
| DNA39975 (TAT360) | breast tumor | normal breast tissue |
| DNA39975 (TAT360) | colon tumor | normal colon tissue |
| DNA39975 (TAT360) | uterine tumor | normal uterine tissue |
| DNA39975 (TAT360) | stomach tumor | normal stomach tissue |
| DNA39979 (TAT361) | breast tumor | normal breast tissue |
| DNA39979 (TAT361) | colon tumor | normal colon tissue |
| DNA39979 (TAT361) | uterine tumor | normal uterine tissue |
| DNA39979 (TAT361) | ovarian tumor | normal ovarian tissue |
| DNA39979 (TAT361) | neuroendocrine tumor | normal neuroendocrine tissue |
| DNA39979 (TAT361) | pancreatic tumor | normal pancreatic tissue |
| DNA39979 (TAT361) | prostate tumor | normal prostate tissue |
| DNA40594 (TAT362) | lymphoid tumor | normal lymphoid tissue |
| DNA40594 (TAT362) | colon tumor | normal colon tissue |
| DNA336539 (TAT363) | breast tumor | normal breast tissue |
| DNA336539 (TAT363) | prostate tumor | normal prostate tissue |
| DNA225930 (TAT364) | uterine tumor | normal uterine tissue |
| DNA225930 (TAT364) | ovarian tumor | normal ovarian tissue |
| DNA271250 (TAT366) | lung tumor | normal lung tissue |
| DNA271250 (TAT366) | bladder tumor | normal bladder tissue |
| DNA271250 (TAT366) | ovarian tumor | normal ovarian tissue |
| DNA271250 (TAT366) | endometrial tumor | normal endometrial tissue |
| DNA271250 (TAT366) | kidney tumor | normal kidney tissue |
| DNA271250 (TAT366) | pancreatic tumor | normal pancreatic tissue |
| DNA210128 (TAT367) | prostate tumor | normal prostate tissue |
| DNA210128 (TAT367) | kidney tumor | normal kidney tissue |
| DNA210128 (TAT367) | lung tumor | normal lung tissue |
| DNA257955 (TAT368) | lymphoid tumor | normal lymphoid tissue |
| DNA257955 (TAT368) | hematopoietic tissue | normal hematopoietic tissue |
| | associated tumor | |
| DNA266520 (TAT369) | breast tumor | normal breast tissue |
| DNA266520 (TAT369) | prostate tumor | normal prostate tissue |
| DNA327261 (TAT370) | colon tumor | normal colon tissue |
| DNA327261 (TAT370) | kidney tumor | normal kidney tissue |
| DNA327295 (TAT371) | kidney tumor | normal kidney tissue |
| DNA327295 (TAT371) | endometrial tumor | normal endometrial tissue |
| DNA327295 (TAT371) | ovarian tumor | normal ovarian tissue |
| DNA225786 (TAT372) | lymphoid tumor | normal lymphoid tissue |
| DNA225786 (TAT372) | spleen tumor | normal spleen tissue |
| DNA225786 (TAT372) | pancreas tumor | normal pancreas tissue |
| DNA225786 (TAT372) | colon tumor | normal colon tissue |
| DNA225786 (TAT372) | rectum tumor | normal rectum tissue |
| DNA226374 (TAT380) | lung tumor | normal lung tissue |
| DNA226374 (TAT380) | thyroid tumor | normal thyroid tissue |
| DNA226374 (TAT380) | prostate tumor | normal prostate tissue |
| DNA226374 (TAT380) | uterine tumor | normal uterine tissue |
| DNA226374 (TAT380) | adrenal tumor | normal adrenal tissue |
| DNA226374 (TAT380) | bone tumor | normal bone tissue |
| DNA226374 (TAT380) | esophageal tumor | normal esophageal tissue |
| DNA255788 (TAT381) | prostate tumor | normal prostate tissue |
| DNA255788 (TAT381) | ovarian tumor | normal ovarian tissue |
| DNA255788 (TAT381) | bladder tumor | normal bladder tissue |
| DNA327296 (TAT382) | uterine tumor | normal uterine tissue |
| DNA327296 (TAT382) | myeloid tumor | normal myeloid tissue |
| DNA327296 (TAT382) | ovarian tumor | normal ovarian tissue |
| DNA327296 (TAT382) | kidney tumor | normal kidney tissue |
| DNA327296 (TAT382) | prostate tumor | normal prostate tissue |
| DNA327296 (TAT382) | pancreatic tumor | normal pancreatic tissue |
| DNA327296 (TAT382) | thyroid tumor | normal thyroid tissue |
| DNA96970 (TAT383) | soft tissue tumor | normal soft tissue |
| DNA96970 (TAT383) | testis tumor | normal testis tissue |
| DNA225790 (TAT384) | lung tumor | normal lung tissue |
| DNA225790 (TAT384) | breast tumor | normal breast tissue |
| DNA225790 (TAT384) | uterine tumor | normal uterine tissue |
| DNA225790 (TAT384) | pancreatic tumor | normal pancreatic tissue |
| DNA225790 (TAT384) | bladder tumor | normal bladder tissue |
| DNA225790 (TAT384) | esophageal tumor | normal esophageal tissue |
| DNA225790 (TAT384) | testis tumor | normal testis tissue |
| DNA225790 (TAT384) | ovarian tumor | normal ovarian tissue |
| DNA225790 (TAT384) | colon tumor | normal colon tissue |
| DNA92958 (TAT385) | glioma | normal glial tissue |
| DNA92958 (TAT385) | brain tumor | normal brain tissue |
| DNA257716 (TAT386) | adrenal tumor | normal adrenal tissue |
| DNA257716 (TAT386) | kidney tumor | normal kidney tissue |
| DNA226862 (TAT387) | brain tumor | normal brain tissue |
| DNA226862 (TAT387) | lung tumor | normal lung tissue |
| DNA226862 (TAT387) | breast tumor | normal breast tissue |
| DNA226862 (TAT387) | uterine tumor | normal uterine tissue |
| DNA226862 (TAT387) | soft tissue tumor | normal soft tissue |
| DNA226862 (TAT387) | colon tumor | normal colon tissue |
| DNA226862 (TAT387) | pancreatic tumor | normal pancreatic tissue |
| DNA226862 (TAT387) | ovarian tumor | normal ovarian tissue |
| DNA226862 (TAT387) | prostate tumor | normal prostate tissue |
| DNA226862 (TAT387) | testis tumor | normal testis tissue |
| DNA331165 (TAT388) | ovarian tumor | normal ovarian tissue |
| DNA331165 (TAT388) | small cell lung tumor | normal small cell lung tissue |
| DNA331167 (TAT389) | adrenal tumor | normal adrenal tissue |
| DNA331167 (TAT389) | pancreatic tumor | normal pancreatic tissue |
| DNA331173 (TAT390) | small cell lung tumor | normal small cell lung tissue |
| DNA331173 (TAT390) | lung tumor | normal lung tissue |
| DNA331171 (TAT391) | adrenal tumor | normal adrenal tissue |
| DNA331171 (TAT391) | small cell lung tumor | normal small cell lung tissue |
| DNA331171 (TAT391) | lung tumor | normal lung tissue |
| DNA226266 (TAT392) | adrenal tumor | normal adrenal tissue |
| DNA226266 (TAT392) | uterine tumor | normal uterine tissue |
| DNA226266 (TAT392) | breast tumor | normal breast tissue |
| DNA199793 (TAT397) | adrenal tumor | normal adrenal tissue |
| DNA199793 (TAT397) | breast tumor | normal breast tissue |
| DNA199793 (TAT397) | soft tissue tumor | normal soft tissue |
| DNA199793 (TAT397) | ovarian tumor | normal ovarian tissue |
| DNA199793 (TAT397) | prostate tumor | normal prostate tissue |
| DNA210647 (TAT398) | soft tissue tumor | normal soft tissue |
| DNA210647 (TAT398) | adrenal tumor | normal adrenal tissue |
| DNA210647 (TAT398) | lung tumor | normal lung tissue |
| DNA210647 (TAT398) | colon tumor | normal colon tissue |
| DNA332801 (TAT427) | soft tissue tumor | normal soft tissue |
| DNA332801 (TAT427) | adrenal tumor | normal adrenal tissue |
| DNA332801 (TAT427) | lung tumor | normal lung tissue |
| DNA332801 (TAT427) | colon tumor | normal colon tissue |
| DNA226884 (TAT399) | kidney tumor | normal kidney tissue |
| DNA226884 (TAT399) | uterine tumor | normal uterine tissue |
| DNA226884 (TAT399) | colon tumor | normal colon tissue |
| DNA335916 (TAT423) | kidney tumor | normal kidney tissue |
| DNA335916 (TAT423) | uterine tumor | normal uterine tissue |
| DNA335916 (TAT423) | colon tumor | normal colon tissue |

### EXAMPLE 6

### Identification of TAT Polypeptides That Are Specifically Expressed by B Cells

[0983] Using the GeneExpress®- and GEPIS-associated tissue expression analyses described in the Examples above, various TAT polypeptides have been identified as being specifically expressed on the surface of both normal and malignant B cells. By “specifically expressed” on a certain tissue or cell type, it is meant that the TAT polypeptide is expressed by that certain tissue or cell type and is not significantly expressed by any other tissue or cell type. TAT polypeptides that are specifically expressed on the surface of both normal and malignant B cells are excellent polypeptide targets for the treatment of B cell-associated cancers including, for example, high, intermediate and low grade lymphomas (including B cell lymphomas such as, for example, mucosa-associated-lymphoid tissue B cell lymphoma and non-Hodgkin's lymphoma, mantle cell lymphoma, Burkitt's lymphoma, marginal zone lymphoma, diffuse large cell lymphoma, follicular lymphoma, and Hodgkin's lymphoma) and leukemias (including chronic lymphocytic leukemia), multiple myeloma, and other hematological and/or B cell-associated cancers. In this regard, we note that RITUXAN® (Genentech Inc., South San Francisco, Calif.) is an antibody that binds to the CD20 antigen that is specifically expressed on the surface of both normal and malignant B cells and which has been used successfully to treat non-Hodgkin's lymphoma in humans. The following are TAT polypeptides that have been herein identified as being specifically expressed on the surface of both normal and malignant B-cells and, therefore, will serve as excellent polypeptide targets for the treatment of B-cell-associated cancers: TAT344 (DNA182432) and TAT368 (DNA257955).

### EXAMPLE 7

### Use of TAT as a Hybridization Probe

[0984] The following method describes use of a nucleotide sequence encoding TAT as a hybridization probe for, i.e., diagnosis of the presence of a tumor in a mammal.

[0985] DNA comprising the coding sequence of full-length or mature TAT as disclosed herein can also be employed as a probe to screen for homologous DNAs (such as those encoding naturally-occurring variants of TAT) in human tissue cDNA libraries or human tissue genomic libraries.

[0986] Hybridization and washing of filters containing either library DNAs is performed under the following high stringency conditions. Hybridization of radiolabeled TAT-derived probe to the filters is performed in a solution of 50% formamide, 5×SSC, 0.1% SDS, 0.1% sodium pyrophosphate, 50 mM sodium phosphate, pH 6.8, 2× Denhardt's solution, and 10% dextran sulfate at 42° C. for 20 hours. Washing of the filters is performed in an aqueous solution of 0.1×SSC and 0.1% SDS at 42° C.

[0987] DNAs having a desired sequence identity with the DNA encoding full-length native sequence TAT can then be identified using standard techniques known in the art.

### EXAMPLE 8

### Expression of TAT in E. coli

[0988] This example illustrates preparation of an unglycosylated form of TAT by recombinant expression in E. coli.

[0989] The DNA sequence encoding TAT is initially amplified using selected PCR primers. The primers should contain restriction enzyme sites which correspond to the restriction enzyme sites on the selected expression vector. A variety of expression vectors may be employed. An example of a suitable vector is pBR322 (derived from E. coli; see Bolivar et al., Gene, 2:95 (1977)) which contains genes for ampicillin and tetracycline resistance. The vector is digested with restriction enzyme and dephosphorylated. The PCR amplified sequences are then ligated into the vector. The vector will preferably include sequences which encode for an antibiotic resistance gene, a trp promoter, a polyhis leader (including the first six STII codons, polyhis sequence, and enterokinase cleavage site), the TAT coding region, lambda transcriptional terminator, and an argu gene.

[0990] The ligation mixture is then used to transform a selected E. coli strain using the methods described in Sambrook et al., supra. Transformants are identified by their ability to grow on LB plates and antibiotic resistant colonies are then selected. Plasmid DNA can be isolated and confirmed by restriction analysis and DNA sequencing.

[0991] Selected clones can be grown overnight in liquid culture medium such as LB broth supplemented with antibiotics. The overnight culture may subsequently be used to inoculate a larger scale culture. The cells are then grown to a desired optical density, during which the expression promoter is turned on.

[0992] After culturing the cells for several more hours, the cells can be harvested by centrifugation. The cell pellet obtained by the centrifugation can be solubilized using various agents known in the art, and the solubilized TAT protein can then be purified using a metal chelating column under conditions that allow tight binding of the protein.

[0993] TAT may be expressed in E. coli in a poly-His tagged form, using the following procedure. The DNA encoding TAT is initially amplified using selected PCR primers. The primers will contain restriction enzyme sites which correspond to the restriction enzyme sites on the selected expression vector, and other useful sequences providing for efficient and reliable translation initiation, rapid purification on a metal chelation column, and proteolytic removal with enterokinase. The PCR-amplified, poly-His tagged sequences are then ligated into an expression vector, which is used to transform an E. coli host based on strain 52 (W3110 fuhA(tonA) lon galE rpoHts(htpRts) clpP(lacIq). Transformants are first grown in LB containing 50 mg/ml carbenicillin at 30° C. with shaking until an O.D.600 of 3-5 is reached. Cultures are then diluted 50-100 fold into CRAP media (prepared by mixing 3.57 g (NH₄)₂SO₄, 0.71 g sodium citrate.2H₂O, 1.07 g KCl, 5.36 g Difco yeast extract, 5.36 g Sheffield hycase SF in 500 mL water, as well as 110 mM MPOS, pH 7.3, 0.55% (w/v) glucose and 7 mM MgSO₄) and grown for approximately 20-30 hours at 30° C. with shaking. Samples are removed to verify expression by SDS-PAGE analysis, and the bulk culture is centrifuged to pellet the cells. Cell pellets are frozen until purification and refolding.

[0994] E. coli paste from 0.5 to 1 L fermentations (6-10 g pellets) is resuspended in 10 volumes (w/v) in 7 M guanidine, 20 mM Tris, pH 8 buffer. Solid sodium sulfite and sodium tetrathionate is added to make final concentrations of 0.1M and 0.02 M, respectively, and the solution is stirred overnight at 4° C. This step results in a denatured protein with all cysteine residues blocked by sulfitolization. The solution is centrifuged at 40,000 rpm in a Beckman Ultracentifuge for 30 min. The supernatant is diluted with 3-5 volumes of metal chelate column buffer (6 M guanidine, 20 mM Tris, pH 7.4) and filtered through 0.22 micron filters to clarify. The clarified extract is loaded onto a 5 ml Qiagen Ni-NTA metal chelate column equilibrated in the metal chelate column buffer. The column is washed with additional buffer containing 50 mM imidazole (Calbiochem, Utrol grade), pH 7.4. The protein is eluted with buffer containing 250 mM imidazole. Fractions containing the desired protein are pooled and stored at 4° C. Protein concentration is estimated by its absorbance at 280 m using the calculated extinction coefficient based on its amino acid sequence. The proteins are refolded by diluting the sample slowly into freshly prepared refolding buffer consisting of: 20 mM Tris, pH 8.6, 0.3 M NaCl, 2.5 M urea, 5 mM cysteine, 20 mM glycine and 1 mM EDTA. Refolding volumes are chosen so that the final protein concentration is between 50 to 100 micrograms/ml. The refolding solution is stirred gently at 4° C. for 12-36 hours. The refolding reaction is quenched by the addition of TFA to a final concentration of 0.4% (pH of approximately 3). Before further purification of the protein, the solution is filtered through a 0.22 micron filter and acetonitrile is added to 2-10% final concentration. The refolded protein is chromatographed on a Poros R1/H reversed phase column using a mobile buffer of 0.1% TFA with elution with a gradient of acetonitrile from 10 to 80%. Aliquots of fractions with A280 absorbance are analyzed on SDS polyacrylamide gels and fractions containing homogeneous refolded protein are pooled. Generally, the properly refolded species of most proteins are eluted at the lowest concentrations of acetonitrile since those species are the most compact with their hydrophobic interiors shielded from interaction with the reversed phase resin. Aggregated species are usually eluted at higher acetonitrile concentrations. In addition to resolving misfolded forms of proteins from the desired form, the reversed phase step also removes endotoxin from the samples.

[0995] Fractions containing the desired folded TAT polypeptide are pooled and the acetonitrile removed using a gentle stream of nitrogen directed at the solution. Proteins are formulated into 20 mM Hepes, pH 6.8 with 0.14 M sodium chloride and 4% mannitol by dialysis or by gel filtration using G25 Superfine (Pharmacia) resins equilibrated in the formulation buffer and sterile filtered.

[0996] Certain of the TAT polypeptides disclosed herein have been successfully expressed and purified using this technique(s).

### EXAMPLE 9

### Expression of TAT in Mammalian Cells

[0997] This example illustrates preparation of a potentially glycosylated form of TAT by recombinant expression in mammalian cells.

[0998] The vector, pRK5 (see EP 307,247, published Mar. 15, 1989), is employed as the expression vector. Optionally, the TAT DNA is ligated into pRK5 with selected restriction enzymes to allow insertion of the TAT DNA using ligation methods such as described in Sambrook et al., supra. The resulting vector is called pRK5-TAT.

[0999] In one embodiment, the selected host cells may be 293 cells. Human 293 cells (ATCC CCL 1573) are grown to confluence in tissue culture plates in medium such as DMEM supplemented with fetal calf serum and optionally, nutrient components and/or antibiotics. About 10 μg pRK5-TAT DNA is mixed with about 1 μg DNA encoding the VA RNA gene [Thimmappaya et al., Cell, 31:543 (1982)] and dissolved in 500 μl of 1 mM Tris-HCl, 0.1 mM EDTA, 0.227 M CaCl₂. To this mixture is added, dropwise, 500 μl of 50 mM HEPES (pH 7.35), 280 mM NaCl, 1.5 mM NaPO₄, and a precipitate is allowed to form for 10 minutes at 25° C. The precipitate is suspended and added to the 293 cells and allowed to settle for about four hours at 37° C. The culture medium is aspirated off and 2 ml of 20% glycerol in PBS is added for 30 seconds. The 293 cells are then washed with serum free medium, fresh medium is added and the cells are incubated for about 5 days.

[1000] Approximately 24 hours after the transfections, the culture medium is removed and replaced with culture medium (alone) or culture medium containing 200 μCi/ml ³⁵S-cysteine and 200 μCi/ml ³⁵S-methionine. After a 12 hour incubation, the conditioned medium is collected, concentrated on a spin filter, and loaded onto a 15% SDS gel. The processed gel may be dried and exposed to film for a selected period of time to reveal the presence of TAT polypeptide. The cultures containing transfected cells may undergo further incubation (in serum free medium) and the medium is tested in selected bioassays.

[1001] In an alternative technique, TAT may be introduced into 293 cells transiently using the dextran sulfate method described by Somparyrac et al., Proc. Natl. Acad. Sci., 12:7575 (1981). 293 cells are grown to maximal density in a spinner flask and 700 μg pRK5-TAT DNA is added. The cells are first concentrated from the spinner flask by centrifugation and washed with PBS. The DNA-dextran precipitate is incubated on the cell pellet for four hours. The cells are treated with 20% glycerol for 90 seconds, washed with tissue culture medium, and re-introduced into the spinner flask containing tissue culture medium, 5 μg/ml bovine insulin and 0.1 μg/ml bovine transferrin. After about four days, the conditioned media is centrifuged and filtered to remove cells and debris. The sample containing expressed TAT can then be concentrated and purified by any selected method, such as dialysis and/or column chromatography.

[1002] In another embodiment, TAT can be expressed in CHO cells. The pRK5-TAT can be transfected into CHO cells using known reagents such as CaPO₄ or DEAE-dextran. As described above, the cell cultures can be incubated, and the medium replaced with culture medium (alone) or medium containing a radiolabel such as ³⁵S-methionine. After determining the presence of TAT polypeptide, the culture medium may be replaced with serum free medium. Preferably, the cultures are incubated for about 6 days, and then the conditioned medium is harvested. The medium containing the expressed TAT can then be concentrated and purified by any selected method.

[1003] Epitope-tagged TAT may also be expressed in host CHO cells. The TAT may be subcloned out of the pRK5 vector. The subclone insert can undergo PCR to fuse in frame with a selected epitope tag such as a poly-his tag into a Baculovirus expression vector. The poly-his tagged TAT insert can then be subcloned into a SV40 driven vector containing a selection marker such as DHFR for selection of stable clones. Finally, the CHO cells can be transfected (as described above) with the SV40 driven vector. Labeling may be performed, as described above, to verify expression. The culture medium containing the expressed poly-His tagged TAT can then be concentrated and purified by any selected method, such as by Ni²⁺-chelate affinity chromatography.

[1004] TAT may also be expressed in CHO and/or COS cells by a transient expression procedure or in CHO cells by another stable expression procedure.

[1005] Stable expression in CHO cells is performed using the following procedure. The proteins are expressed as an IgG construct (immunoadhesin), in which the coding sequences for the soluble forms (e.g. extracellular domains) of the respective proteins are fused to an IgG1 constant region sequence containing the hinge, CH2 and CH2 domains and/or is a poly-His tagged form.

[1006] Following PCR amplification, the respective DNAs are subcloned in a CHO expression vector using standard techniques as described in Ausubel et al., Current Protocols of Molecular Biology, Unit 3.16, John Wiley and Sons (1997). CHO expression vectors are constructed to have compatible restriction sites 5′ and 3′ of the DNA of interest to allow the convenient shuttling of cDNA's. The vector used expression in CHO cells is as described in Lucas et al., Nucl. Acids Res. 24:9 (1774-1779 (1996), and uses the SV40 early promoter/enhancer to drive expression of the cDNA of interest and dihydrofolate reductase (DHFR). DHFR expression permits selection for stable maintenance of the plasmid following transfection.

[1007] Twelve micrograms of the desired plasmid DNA is introduced into approximately 10 million CHO cells using commercially available transfection reagents Superfect® (Quiagen), Dosper® or Fugene® (Boehringer Mannheim). The cells are grown as described in Lucas et al.,supra. Approximately 3×10⁷ cells are frozen in an ampule for further growth and production as described below.

[1008] The ampules containing the plasmid DNA are thawed by placement into water bath and mixed by vortexing. The contents are pipetted into a centrifuge tube containing 10 mLs of media and centrifuged at 1000 rpm for 5 minutes. The supernatant is aspirated and the cells are resuspended in 10 mL of selective media (0.2 μm filtered PS20 with 5% 0.2 μm diafiltered fetal bovine serum). The cells are then aliquoted into a 100 mL spinner containing 90 mL of selective media. After 1-2 days, the cells are transferred into a 250 mL spinner filled with 150 mL selective growth medium and incubated at 37° C. After another 2-3 days, 250 mL, 500 mL and 2000 mL spinners are seeded with 3×10⁵ cells/mL. The cell media is exchanged with fresh media by centrifugation and resuspension in production medium. Although any suitable CHO media may be employed, a production medium described in U.S. Pat. No. 5,122,469, issued Jun. 16, 1992 may actually be used. A 3L production spinner is seeded at 1.2×10⁶ cells/mL. On day 0, the cell number pH ie determined. On day 1, the spinner is sampled and sparging with filtered air is commenced. On day 2, the spinner is sampled, the temperature shifted to 33° C., and 30 mL of 500 g/L glucose and 0.6 mL of 10% antifoam (e.g., 35% polydimethylsiloxane emulsion, Dow Corning 365 Medical Grade Emulsion) taken. Throughout the production, the pH is adjusted as necessary to keep it at around 7.2. After 10 days, or until the viability dropped below 70%, the cell culture is harvested by centrifugation and filtering through a 0.22 μm filter. The filtrate was either stored at 4° C. or immediately loaded onto columns for purification.

[1009] For the poly-His tagged constructs, the proteins are purified using a Ni-NTA column (Qiagen). Before purification, imidazole is added to the conditioned media to a concentration of 5 mM. The conditioned media is pumped onto a 6 ml Ni-NTA column equilibrated in 20 mM Hepes, pH 7.4, buffer containing 0.3 M NaCl and 5 mM imidazole at a flow rate of 4-5 ml/min. at 4° C. After loading, the column is washed with additional equilibration buffer and the protein eluted with equilibration buffer containing 0.25 M imidazole. The highly purified protein is subsequently desalted into a storage buffer containing 10 mM Hepes, 0.14 M NaCl and 4% mannitol, pH 6.8, with a 25 ml G25 Superfine (Pharmacia) column and stored at −80° C.

[1010] Immunoadhesin (Fc-containing) constructs are purified from the conditioned media as follows. The conditioned medium is pumped onto a 5 ml Protein A column (Pharmacia) which had been equilibrated in 20 mM Na phosphate buffer, pH 6.8. After loading, the column is washed extensively with equilibration buffer before elution with 100 mM citric acid, pH 3.5. The eluted protein is immediately neutralized by collecting 1 ml fractions into tubes containing 275 μL of 1 M Tris buffer, pH 9. The highly purified protein is subsequently desalted into storage buffer as described above for the poly-His tagged proteins. The homogeneity is assessed by SDS polyacrylamide gels and by N-terminal amino acid sequencing by Edman degradation.

[1011] Certain of the TAT polypeptides disclosed herein have been successfully expressed and purified using this technique(s).

### EXAMPLE 10

### Expression of TAT in Yeast

[1012] The following method describes recombinant expression of TAT in yeast.

[1013] First, yeast expression vectors are constructed for intracellular production or secretion of TAT from the ADH2/GAPDH promoter. DNA encoding TAT and the promoter is inserted into suitable restriction enzyme sites in the selected plasmid to direct intracellular expression of TAT. For secretion, DNA encoding TAT can be cloned into the selected plasmid, together with DNA encoding the ADH2/GAPDH promoter, a native TAT signal peptide or other mammalian signal peptide, or, for example, a yeast alpha-factor or invertase secretory signal/leader sequence, and linker sequences (if needed) for expression of TAT.

[1014] Yeast cells, such as yeast strain AB110, can then be transformed with the expression plasmids described above and cultured in selected fermentation media. The transformed yeast supernatants can be analyzed by precipitation with 10% trichloroacetic acid and separation by SDS-PAGE, followed by staining of the gels with Coomassie Blue stain.

[1015] Recombinant TAT can subsequently be isolated and purified by removing the yeast cells from the fermentation medium by centrifugation and then concentrating the medium using selected cartridge filters. The concentrate containing TAT may further be purified using selected column chromatography resins.

[1016] Certain of the TAT polypeptides disclosed herein have been successfully expressed and purified using this technique(s).

### EXAMPLE 11

### Expression of TAT in Baculovirus-Infected Insect Cells

[1017] The following method describes recombinant expression of TAT in Baculovirus-infected insect cells. The sequence coding for TAT is fused upstream of an epitope tag contained within a baculovirus expression vector. Such epitope tags include poly-his tags and immunoglobulin tags (like Fc regions of IgG). A variety of plasmids may be employed, including plasmids derived from commercially available plasmids such as pVL1393 (Novagen). Briefly, the sequence encoding TAT or the desired portion of the coding sequence of TAT such as the sequence encoding an extracellular domain of a transmembrane protein or the sequence encoding the mature protein if the protein is extracellular is amplified by PCR with primers complementary to the 5′ and 3′ regions. The 5′ primer may incorporate flanking (selected) restriction enzyme sites. The product is then digested with those selected restriction enzymes and subcloned into the expression vector.

[1018] Recombinant baculovirus is generated by co-transfecting the above plasmid and BaculoGold™ virus DNA (Pharmingen) into Spodoptera frugiperda (“Sf9”) cells (ATCC CRL 1711) using lipofectin (commercially available from GIBCO-BRL). After 4-5 days of incubation at 28° C., the released viruses are harvested and used for further amplifications. Viral infection and protein expression are performed as described by O'Reilley et al., Baculovirus expression vectors: A Laboratory Manual, Oxford: Oxford University Press (1994).

[1019] Expressed poly-his tagged TAT can then be purified, for example, by Ni ²⁺-chelate affinity chromatography as follows. Extracts are prepared from recombinant virus-infected Sf9 cells as described by Rupert et al., Nature, 362:175-179 (1993). Briefly, Sf9 cells are washed, resuspended in sonication buffer (25 mL Hepes, pH 7.9; 12.5 mM MgCl₂; 0.1 mM EDTA; 10% glycerol; 0.1% NP-40; 0.4 M KCl), and sonicated twice for 20 seconds on ice. The sonicates are cleared by centrifugation, and the supernatant is diluted 50-fold in loading buffer (50 mM phosphate, 300 mM NaCl, 10% glycerol, pH 7.8) and filtered through a 0.45 μm filter. A Ni²⁺-NTA agarose column (commercially available from Qiagen) is prepared with a bed volume of 5 mL, washed with 25 mL of water and equilibrated with 25 mL of loading buffer. The filtered cell extract is loaded onto the column at 0.5 mL per minute. The column is washed to baseline A₂₈₀ with loading buffer, at which point fraction collection is started. Next, the column is washed with a secondary wash buffer (50 mM phosphate; 300 mM NaCl, 10% glycerol, pH 6.0), which elutes nonspecifically bound protein. After reaching A₂₈₀ baseline again, the column is developed with a 0 to 500 mM Imidazole gradient in the secondary wash buffer. One mL fractions are collected and analyzed by SDS-PAGE and silver staining or Western blot with Ni²⁺-NTA-conjugated to alkaline phosphatase (Qiagen). Fractions containing the eluted His₁₀-tagged TAT are pooled and dialyzed against loading buffer.

[1020] Alternatively, purification of the IgG tagged (or Fc tagged) TAT can be performed using known chromatography techniques, including for instance, Protein A or protein G column chromatography.

[1021] Certain of the TAT polypeptides disclosed herein have been successfully expressed and purified using this technique(s).

### EXAMPLE 12

### Preparation of Antibodies that Bind TAT

[1022] This example illustrates preparation of monoclonal antibodies which can specifically bind TAT.

[1023] Techniques for producing the monoclonal antibodies are known in the art and are described, for instance, in Goding, supra. Immunogens that may be employed include purified TAT, fusion proteins containing TAT, and cells expressing recombinant TAT on the cell surface. Selection of the immunogen can be made by the skilled artisan without undue experimentation.

[1024] Mice, such as Balb/c, are immunized with the TAT immunogen emulsified in complete Freund's adjuvant and injected subcutaneously or intraperitoneally in an amount from 1-100 micrograms. Alternatively, the immunogen is emulsified in MPL-TDM adjuvant (Ribi Immunochemical Research, Hamilton, Mont.) and injected into the animal's hind foot pads. The immunized mice are then boosted 10 to 12 days later with additional immunogen emulsified in the selected adjuvant. Thereafter, for several weeks, the mice may also be boosted with additional immunization injections. Serum samples may be periodically obtained from the mice by retro-orbital bleeding for testing in ELISA assays to detect anti-TAT antibodies.

[1025] After a suitable antibody titer has been detected, the animals “positive” for antibodies can be injected with a final intravenous injection of TAT. Three to four days later, the mice are sacrificed and the spleen cells are harvested. The spleen cells are then fused (using 35% polyethylene glycol) to a selected murine myeloma cell line such as P3X63AgU. 1, available from ATCC, No. CRL 1597. The fusions generate hybridoma cells which can then be plated in 96 well tissue culture plates containing HAT (hypoxanthine, aminopterin, and thymidine) medium to inhibit proliferation of non-fused cells, myeloma hybrids, and spleen cell hybrids.

[1026] The hybridoma cells will be screened in an ELISA for reactivity against TAT. Determination of “positive” hybridoma cells secreting the desired monoclonal antibodies against TAT is within the skill in the art.

[1027] The positive hybridoma cells can be injected intraperitoneally into syngeneic Balb/c mice to produce ascites containing the anti-TAT monoclonal antibodies. Alternatively, the hybridoma cells can be grown in tissue culture flasks or roller bottles. Purification of the monoclonal antibodies produced in the ascites can be accomplished using ammonium sulfate precipitation, followed by gel exclusion chromatography. Alternatively, affinity chromatography based upon binding of antibody to protein A or protein G can be employed.

[1028] Antibodies directed against certain of the TAT polypeptides disclosed herein have been successfully produced using this technique(s).

### EXAMPLE 13

### Purification of TAT Polypeptides Using Specific Antibodies

[1029] Native or recombinant TAT polypeptides may be purified by a variety of standard techniques in the art of protein purification. For example, pro-TAT polypeptide, mature TAT polypeptide, or pre-TAT polypeptide is purified by immunoaffinity chromatography using antibodies specific for the TAT polypeptide of interest. In general, an immunoaffinity column is constructed by covalently coupling the anti-TAT polypeptide antibody to an activated chromatographic resin.

[1030] Polyclonal immunoglobulins are prepared from immune sera either by precipitation with ammonium sulfate or by purification on immobilized Protein A (Pharmacia LKB Biotechnology, Piscataway, N.J.). Likewise, monoclonal antibodies are prepared from mouse ascites fluid by ammonium sulfate precipitation or chromatography on immobilized Protein A. Partially purified immunoglobulin is covalently attached to a chromatographic resin such as CnBr-activated SEPHAROSE™ (Pharmacia LKB Biotechnology). The antibody is coupled to the resin, the resin is blocked, and the derivative resin is washed according to the manufacturer's instructions.

[1031] Such an immunoaffinity column is utilized in the purification of TAT polypeptide by preparing a fraction from cells containing TAT polypeptide in a soluble form. This preparation is derived by solubilization of the whole cell or of a subcellular fraction obtained via differential centrifugation by the addition of detergent or by other methods well known in the art. Alternatively, soluble TAT polypeptide containing a signal sequence may be secreted in useful quantity into the medium in which the cells are grown.

[1032] A soluble TAT polypeptide-containing preparation is passed over the immunoaffinity column, and the column is washed under conditions that allow the preferential absorbance of TAT polypeptide (e.g., high ionic strength buffers in the presence of detergent). Then, the column is eluted under conditions that disrupt antibody/TAT polypeptide binding (e.g., a low pH buffer such as approximately pH 2-3, or a high concentration of a chaotrope such as urea or thiocyanate ion), and TAT polypeptide is collected.

### EXAMPLE 14

### In Vitro Tumor Cell Killing Assay

[1033] Mammalian cells expressing the TAT polypeptide of interest may be obtained using standard expression vector and cloning techniques. Alternatively, many tumor cell lines expressing TAT polypeptides of interest are publicly available, for example, through the ATCC and can be routinely identified using standard ELISA or FACS analysis. Anti-TAT polypeptide monoclonal antibodies (and toxin conjugated derivatives thereof) may then be employed in assays to determine the ability of the antibody to kill TAT polypeptide expressing cells in vitro.

[1034] For example, cells expressing the TAT polypeptide of interest are obtained as described above and plated into 96 well dishes. In one analysis, the antibody/toxin conjugate (or naked antibody) is included throughout the cell incubation for a period of 4 days. In a second independent analysis, the cells are incubated for 1 hour with the antibody/toxin conjugate (or naked antibody) and then washed and incubated in the absence of antibody/toxin conjugate for a period of 4 days. Cell viability is then measured using the CellTiter-Glo Luminescent Cell Viability Assay from Promega (Cat# G7571). Untreated cells serve as a negative control.

### EXAMPLE 15

### In Vivo Tumor Cell Killing Assay

[1035] To test the efficacy of conjugated or unconjugated anti-TAT polypeptide monoclonal antibodies, anti-TAT antibody is injected intraperitoneally into nude mice 24 hours prior to receiving tumor promoting cells subcutaneously in the flank. Antibody injections continue twice per week for the remainder of the study.

[1036] Tumor volume is then measured twice per week.

[1037] The foregoing written specification is considered to be sufficient to enable one skilled in the art to practice the invention. The present invention is not to be limited in scope by the construct deposited, since the deposited embodiment is intended as a single illustration of certain aspects of the invention and any constructs that are functionally equivalent are within the scope of this invention. The deposit of material herein does not constitute an admission that the written description herein contained is inadequate to enable the practice of any aspect of the invention, including the best mode thereof, nor is it to be construed as limiting the scope of the claims to the specific illustrations that it represents. Indeed, various modifications of the invention in addition to those shown and described herein will become apparent to those skilled in the art from the foregoing description and fall within the scope of the appended claims.

The application's sequence listing, which the Patent Office published only in electronic form, follows.

SEQUENCE LISTING (158 sequences)

SEQ ID NO: 1 - DNA, 1870 bp, Homo sapien
gttactgcaccccaaaacaggtctggccacggccatgagcatgctgagccatcatgcccaccgtggatgacattctggagcaggttggggagtctggctggttccagaagcaagccttcctcatcttatgcctgctgtcggctgcctttgcgcccatctgtgtgggcatcgtcttcctgggtttcacacctgaccaccactgccagagtcctggggtggctgagctgagccagcgctgtggctggagccctgcggaggagctgaactatacagtgccaggcctggggcccgcgggcgaggccttccttggccagtgcaggcgctatgaagtggactggaaccagagcgccctcagctgtgtagaccccctggctagcctggccaccaacaggagccacctgccgctgggtccctgccaggatggctgggtgtatgacacgcccggctcttccatcgtcactgagttcaacctggtgtgtgctgactcctggaagctggacctctttcagtcctgtttgaatgcgggcttcttgtttggctctctcggtgttggctactttgcagacaggtttggccgtaagctgtgtctcctgggaactgtgctggtcaacgcggtgtcgggcgtgctcatggccttctcgcccaactacatgtccatgctgctcttccgcctgctgcagggcctggtcagcaagggcaactggatggctggctacaccctaatcacagaatttgttggctcgggctccagaagaacggtggcgatcatgtaccagatggccttcacggtggggctggtggcgcttaccgggctggcctacgccctgcctcactggcgctggctgcagctggcagtctccctgcccaccttcctcttcctgctctactactggtgtgtgccggagtcccctcggtggctgttatcacaaaaaagaaacactgaagcaataaagataatggaccacatcgctcaaaagaatgggaagttgcctcctgctgatttaaagatgctttccctcgaagaggatgtcaccgaaaagctgagcccttcatttgcagacctgttccgcacgccgcgcctgaggaagcgcaccttcatcctgatgtacctgtggttcacggactctgtgctctatcaggggctcatcctgcacatgggcgccaccagcgggaacctctacctggatttcctttactccgctctggtcgaaatcccgggggccttcatagccctcatcaccattgaccgcgtgggccgcatctaccccatggccatgtcaaatttgttggcgggggcagcctgcctcgtcatgatttttatctcacctgacctgcactggttaaacatcataatcatgtgtgttggccgaatgggaatcaccattgcaatacaaatgatctgcctggtgaatgctgagctgtaccccacattcgtcaggaacctcggagtgatggtgtgttcctccctgtgtgacataggtgggataatcacccccttcatagtcttcaggctgagggaggtctggcaagccttgcccctcattttgtttgcggtgttgggcctgcttgccgcgggagtgacgctacttcttccagagaccaagggggtcgctttgccagagaccatgaaggacgccgagaaccttgggagaaaagcaaagcccaaagaaaacacgatttaccttaaggtccaaacctcagaaccctcgggcacctgagagagatgttttgcggcgatgtcgtgttggagggatgaagatggagttatcctctgcagaaattcctagacgccttcacttctctgtattcttcctcatacttgcctacccccaaattaatatcagtcctaaagaaaaaaaaaaaaaaaaaa

SEQ ID NO: 2 - DNA, 731 bp, Homo sapien
  Unsure 570, 575, 607, 611, 642, 672, 678: Unknown base
aattagcataacccttcctcaggaagagtgagattttatatttgacaataaagtgttagactccatttctaaataccagacttcaaaagataaggttcaaaagtgttataagaagatattcctttttttgtcctagagaacttattttcctgtgaaaatgcctaccacaaagaagacattgatgttcttatcaagctttttcaccagccttgggtccttcattgtaattttgctctattcttgggacacaagcatggatcaccagtacaattgctgttagagactctgcttcaaatgggagcattttcatcacttacggactttttcgtggggagagtagtgaagaattgagtcacggacttgcagaaccaaagaaaaagtttgcagttttagagatactgaataattcttcccaaaaaactctgcattcggtgactatcctgttcctggtcctgagtttgatcacgtcgctgctgagctctgggtttaccttctacaaacagcatcagcaacccttaccagacattcctggggcccgacgggggtgtacacctgggaacgggcttcggngcatncttcgtttttggtgaccatgatactggtttgngggnaacacgcaggtcccacccaactcttccgaanaagttgtttccaaaatgctttacccccggnaaccanccagtaaaggaacgaccccacaggtaccggatactcgtgctggctcatactgg

SEQ ID NO: 3 - DNA, 2974 bp, Homo sapien
gatcagtgtgtgagggaactgccatcatgaggtctgacaagtcagctttggtatttctgctcctgcagctcttctgtgttggctgtggattctgtgggaaagtcctggtgtggccctgtgacatgagccattggcttaatgtcaaggtcattctagaagagctcatagtgagaggccatgaggtaacagtattgactcactcaaagccttcgttaattgactacaggaagccttctgcattgaaatttgaggtggtccatatgccacaggacagaacagaagaaaatgaaatatttgttgacctagctctgaatgtcttgccaggcttatcaacctggcaatcagttataaaattaaatgatttttttgttgaaataagaggaactttaaaaatgatgtgtgagagctttatctacaatcagacgcttatgaagaagctacaggaaaccaactacgatgtaatgcttatagaccctgtgattccctgtggagacctgatggctgagttgcttgcagtcccttttgtgctcacacttagaatttctgtaggaggcaatatggagcgaagctgtgggaaacttccagctccactttcctatgtacctgtgcctatgacaggactaacagacagaatgacctttctggaaagagtaaaaaattcaatgctttcagttttgttccacttctggattcaggattacgactatcatttttgggaagagttttatagtaaggcattaggaaggcccactacattatgtgagactgtgggaaaagctgagatatggctaatacgaacatattgggattttgaatttcctcaaccataccaacctaactttgagtttgttggaggattgcactgtaaacctgccaaagctttgcctaaggaaatggaaaattttgtccagagttcaggggaagatggtattgtggtgttttctctggggtcactgtttcaaaatgttacagaagaaaaggctaatatcattgcttcagcccttgcccagatcccacagaaggtgttatggaggtacaaaggaaaaaaaccatccacattaggagccaatactcggctgtatgattggataccccagaatgatcttcttggtcatcccaaaaccaaagcttttatcactcatggtggaatgaatgggatctatgaagctatttaccatggggtccctatggtgggagttcccatatttggtgatcagcttgataacatagctcacatgaaggccaaaggagcagctgtagaaataaacttcaaaactatgacaagcgaagatttactgagggctttgagaacagtcattaccgattcctcttataaagagaatgctatgagattatcaagaattcaccatgatcaacctgtaaagcccctagatcgagcagtcttctggatcgagtttgtcatgcgccacaaaggagccaagcacctgcgatcagctgcccatgacctcacctggttccagcactactctatagatgtgattgggttcctgctgacctgtgtggcaactgctatattcttgttcacaaaatgttttttattttcctgtcaaaaatttaataaaactagaaagatagaaaagagggaatagatctttccaaattcaagaaagacctgatggggtaatcctgttaattccagccacatagaatttggtgaaaaccttgctattttcatattatctattctgttattttatcttagctatatagcctagaattccatgatcatgaggttgtgagtatatctcattctttcgttgtattttcctaggtgtctttactctcttctctcactttgtgacacaaggacatgaatacatctaaattttcctatttctgatatgactgttttgatgatgtcattacttctataaccttaagtgatagggtgacatgcaatatgattattcctggtgtgcgcccaaacacatggatataaagaggtaaaaaacttaaaattcacaaaattcagtaaaccacacaaatcaggtaagtgttctatgagattagctggctatgagaaacataatgatgtttctttttcaatttaaataagcctttctacatagccagcatcagtgatctcagaaaataaattgctaataatgatgacatggcattatgcttagaaaagtttgctgtatttccatagacctcatctagatgtcatggcctacatttctgccatcactcaaccaatacttttttctgttttcttgatgataaaaagacctttctcatgattgccatcaaataacaaaagaaactattttttttctcacatagagaacatgtcagtaagatattcaaggtgaacagatatttttgggattagtaactatttgaaatatgtggtgataattactgagtttataaaatttatttgatagtacacttaaagaagatttatatgtttattctttaaaaatgatgaatactcataattcttatctctataatcaaaagtataatttactgtagaaaaataaagagatgcttgttctgaaagtaagatcagtgaactgcttttcagtctcaatctttgagaattgtaaattcatcaaataattgcttacatagtaaaaatttaaggtattagaaaacctgcataacaaatagtattatatattaaatattttgatatgtaaagctctacacaaagctaaatatagtgtaataatgtttacactagtaagcaaatatgttaatcttctcatttttttactgtcatataatcttagtgatatgcctattaatagttttaaataaataaattggcttatctggctttttgaaaattttgaaattcttacagatgttgattaggtatatctacaaattaatttcaattttaaaatgatgatataaaaataaatataagtatttttcttgtgtatgtatacaataaatataaataaaattgtttactgttttgaaagtttcttaagtttta

SEQ ID NO: 4 - DNA, 2459 bp, Homo sapien
gaggatgctgctggggaagatgtgcgcgccgaggtacccgtccgggggcgcctgggaccctcacccaggccaggcttcggggagagcatgtatctgctctcggacaaggccacctcgccgctctcgctggatgctggcctcgggcaggccccctggagcgacctgcttctttgggcactgttgctgaacagggcacagatggccatgtacttctgggagatgggttccaatgcagtttcctcagctcttggggcctgtttgctgctccgggtgatggcacgcctggagcctgacgctgaggaggcagcacggaggaaagacctggcgttcaagtttgaggggatgggcgttgacctctttggcgagtgctatcgcagcagtgaggtgagggctgcccgcctcctcctccgtcgctgcccgctctgggggggatgccacttgcctccagctggccatgcaagctgacgcccgtgccttctttgcccaggatggggtacagtctctgctgacacagaagtggtggggagatatggccagcactacacccatctgggccctggttctcgccttcttttgccctccactcatctacacccgcctcatcaccttcaggaaatcagaagaggagcccacacgggaggagctagagtttgacatggatagtgtcattaatggggaagggcctgtcgggacggcggacccagccgagaagacgccgctgggggtcccgcgccagtcgggccgtccgggttgctgcgggggccgctgcggggggcgccggtgcctacgccgctggttccacttctggggcgcgccggtgaccatcttcatgggcaacgtggtcagctacctgctgttcctgctgcttttctcgcgggtgctgctcgtggatttccagccggcgccgcccggctccctggagctgctgctctatttctgggctttcacgctgctgtgcgaggaactgcgccagggcctgagcggaggcgggggcagcctcgccagcgggggccccgggcctggccatgcctcactgagccagcgcctgcgcctctacctcgccgacagctggaaccagtgcgacctagtggctctcacctgcttcctcctgggcgtgggctgccggctgaccccgggtttgtaccacctgggccgcactgtcctctgcatcgacttcatggttttcacggtgcggctgcttcacatcttcacggtcaacaaacagctggggcccaagatcgtcatcgtgagcaagatgatgaaggacgtgttcttcttcctcttcttcctcggcgtgtggctggtagcctatggcgtggccacggaggggctcctgaggccacgggacagtgacttcccaagtatcctgcgccgcgtcttctaccgtccctacctgcagatcttcgggcagattccccaggaggacatggacgtggccctcatggagcacagcaactgctcgtcggagcccggcttctgggcacaccctcctggggcccaggcgggcacctgcgtctcccagtatgccaactggctggtggtgctgctcctcgtcatcttcctgctcgtggccaacatcctgctggtcaacttgctcattgccatgttcagttacacattcggcaaagtacagggcaacagcgatctctactggaaggcgcaggttaccgcctcatccgggaattccactctcggcccgcgctggccccgccctttatcgtcatctcccacttgcgcctcctgctcaggcaattgtgcaggcgaccccggagcccccagccgtcctccccggccctcgagcatttccgggtttacctttctaaggaagccgagcggaagtgctaacgtgggaatcggtgcataaggagaactttctgctggcacgcgctagggacaagcgggagagcgactccgagcgtctgaagcgcacgtcccagaaggtggacttggcactgaaacagctgggacacatccgcgagtacgaacagcgcctgaaagtgctggagcgggaggtccagcagtgtagccgcgtcctggggtgggtggccgaggccctgagccgctctgccttgctgcccccaggtgggccgccaccccctgacctgcctgggtccaaagactgagccctgctggcggacttcaaggagaagcccccacaggggattttgctcctagagtaaggctcatctgggcctcggcccccgcacctggtggccttgtccttgaggtgagccccatgtccatctgggccactgtcaggaccacctttgggagtgtcatccttacaaaccacagcatgcccggctcctcccagaaccagtcccagcctgggaggatcaaggcctggatcccgggccgttatccatctggaggctgcagggtccttggggtaacagggaccacagacccctcaccactcacagattcctcacactggggaaataaagccatttcagagg

SEQ ID NO: 5 - DNA, 1450 bp, Homo sapien
  Unsure 2: Unknown base
tncccgcagaaccaggaaagtaacggctacagacagtgagaaatagtttcgctcgccggctagaaaaactctgtcggtaccaaccccagagcgttgagagcagcccacctccacgcttccttaacggagaggtgcaggactcagacttcaccagcccactcggtcccagccttgtacgcaaagagacgccaaggacgcgctctcccgcgtccaggcagccccagcttgctggcttgcctgcccgcctgcgtgcagcactcggccggcgtgcagcatgaccctgtggaacggcgtactgcctttttacccccagccccggcatgccgcaggcttcagcgttccactgctcatcgttattctagtgtttttggctctagcagcaagcttcctgctcatcttgccggggatccgtggccactcgcgctggttttggttggtgagagttcttctcagtctgttcataggcgcagaaattgtggctgtgcacttcagtgcagaatggttcgtgggtacagtgaacaccaacacatcctacaaagccttcagcgcagcgcgcgttacagcccgtgtcggtctgctcgtgggcctggagggcattaatattacactcacagggaccccagtgcatcagctgaacgagaccattgactacaacgagcagttcacctggcgtctgaaagagaattacgccgcggagtacgcgaacgcactggagaaggggctgccggacccagtgctctacctggcggagaagttcacaccgagtagcccttgcggcctgtaccaccagtaccacctggcgggacactacgcctcggccacgctatgggtggcgttctgcttctggctcctctccaacgtgctgctctccacgccggccccgctctacggaggcctggcactgctgaccaccggagccttcgcgctcttcggggtcttcgccttggcctccatctctagcgtgccgctctgcccgctccgcctaggctcctccgcgctcaccactcagtacggcgccgccttctgggtcacgctggcaaccggcgtcctgtgcctcttcctcggaggggccgtggtgagtctccagtatgttcggcccagcgctcttcgcacccttctggaccaaagcgccaaggactgcagccaggagagagggggctcacctcttatcctcggcgacccactgcacaagcaggccgctctcccagacttaaaatgtatcaccactaacctgtgagggggacccaatctggactccttccccgccttgggacatcgcaggccgggaagcagtgcccgccaggcctgggccaggagagctccaggaagggcactgagcgctgctggcgcgaggcctcggacatccgcaggcaccagggaaagtctcctggggcgatctgtaaataaacctttttttcttttgttttttaaaaaaaaataaaagtcgacc

SEQ ID NO: 6 - DNA, 2877 bp, Homo sapien
ctgcaggcttcaggaggggacacaagcatggagcggctttggggtctattccagagagcgcaacaactgtccccaagatcctctcagaccgtctaccagcgtgtggaaggcccccggaaagggcacctggaggaggaagaggaagacggggaggagggggcggagacattggcccacttctgccccatggagctgaggggccctgagcccctgggctctagacccaggcagccaaacctcattccctgggcggcagcaggacggagggctgccccctacctggtcctgacggccctgctgatcttcactggggccttcctactgggctacgtcgccttccgagggtcctgccaggcgtgcggagactctgtgttggtggtcagtgaggatgtcaactatgagcctgacctggatttccaccagggcagactctactggagcgacctccaggccatgttcctgcagttcctgggggaggggcgcctggaggacaccatcaggcaaaccagccttcgggaacgggtggcaggctcggccgggatggccgctctgactcaggacattcgcgcggcgctctcccgccagaagctggaccacgtgtggaccgacacgcactacgtggggctgcaattcccggatccggctcaccccaacaccctgcactgggtcgatgaggccgggaaggtcggagagcagctgccgctggaggaccctgacgtctactgcccctacagcgccatcggcaacgtcacgggagagctggtgtacgcccactacgggcggcccgaagacctgcaggacctgcgggccaggggcgtggatccagtgggccgcctgctgctggtgcgcgtgggggtgatcagcttcgcccagaaggtgaccaatgctcaggacttcggggctcaaggagtgctcatatacccagagccagcggacttctcccaggacccacccaagccaagcctgtccagccagcaggcagtgtatggacatgtgcacctgggaactggagacccctacacacctggcttcccttccttcaatcaaacccagttccctccagttgcatcatcaggccttcccagcatcccagcccagcccatcagtgcagacattgcctcccgcctgctgaggaagctcaaaggccctgtggccccccaagaatggcaggggagcctcctaggctccccttatcacctgggccccgggccacgactgcggctagtggtcaacaatcacaggacctccacccccatcaacaacatcttcggctgcatcgaaggccgctcagagccagatcactacgttgtcatcggggcccagagggatgcatggggcccaggagcagctaaatccgctgtggggacggctatactcctggagctggtgcggaccttttcctccatggtgagcaacggcttccggccccgcagaagtctcctcttcatcagctgggacggtggtgactttggaagcgtgggctccacggagtggctagaaggctacctcagcgtgctgcacctcaaagccgtagtgtacgtgagcctggacaacgcagtgctgggggatgacaagtttcatgccaagaccagcccccttctgacaagtctcattgagagtgtcctgaagcaggtggattctcccaaccacagtgggcagactctctatgaacaggtggtgttcaccaatcccagctgggatgctgaggtgatccggcccctacccatggacagcagtgcctattccttcacggcctttgtgggagtccctgccgtcgagttctcctttatggaggacgaccaggcctacccattcctgcacacaaaggaggacacttatgagaacctgcataaggtgctgcaaggccgcctgcccgccgtggcccaggccgtggcccagctcgcagggcagctcctcatccggctcagccacgatcgcctgctgcccctcgacttcggccgctacggggacgtcgtcctcaggcacatcgggaacctcaacgagttctctggggacctcaaggcccgcgggctgaccctgcagtgggtgtactcggcgcggggggactacatccgggcggcggaaaagctgcggcaggagatctacagctcggaggagagagacgagcgactgacacgcatgtacaacgtgcgcataatgcgggtggagttctacttcctttcccagtacgtgtcgccagccgactccccgttccgccacatcttcatgggccgtggagaccacacgctgggcgccctgctggaccacctgcggctgctgcgctccaacagctccgggacccccggggccacctcctccactggcttccaggagagccgtttccggcgtcagctagccctgctcacctggacgctgcaaggggcagccaatgcgcttagcggggatgtctggaacattgataacaacttctgaggccctggggatcctcacatccccgtcccccagtcaagagctcctctgctcctcgcttgaatgattcagggtcagggaggtggctcagagtccacctctcattgctgatcaatttctcattacccctacacatctctccacggagcccagaccccagcacagatatccacacaccccagccctgcagtgtagctgaccctaatgtgacggtcatactgtcggttaatcagagagtagcatcccttcaatcacagccccttcccctttctggggtcctccatacctagagaccactctgggaggtttgctaggccctgggacctggccagctctgttagtgggagagatcgctggcaccatagccttatggccaacaggtggtctgtggtgaaaggggcgtggagtttcaatatcaataaaccacctgatatcaataagccaaaa

SEQ ID NO: 7 - DNA, 1926 bp, Homo sapien
gctggagcatcccgctctggtgccgctgcagccggcagagatggttgagctcatgttcccgctgttgctcctccttctgcccttccttctgtatatggctgcgccccaaatcaggaaaatgctgtccagtggggtgtgtacatcaactgttcagcttcctgggaaagtagttgtggtcacaggagctaatacaggtatcgggaaggagacagccaaagagctggctcagagaggagctcgagtatatttagcttgccgggatgtggaaaagggggaattggtggccaaagagatccagaccacgacagggaaccagcaggtgttggtgcggaaactggacctgtctgatactaagtctattcgagcttttgctaagggcttcttagctgaggaaaagcacctccacgttttgatcaacaatgcaggagtgatgatgtgtccgtactcgaagacagcagatggctttgagatgcacataggagtcaaccacttgggtcacttcctcctaacccatctgctgctagagaaactaaaggaatcagccccatcaaggatagtaaatgtgtcttccctcgcacatcacctgggaaggatccacttccataacctgcagggcgagaaattctacaatgcaggcctggcctactgtcacagcaagctagccaacatcctcttcacccaggaactggcccggagactaaaaggctctggcgttacgacgtattctgtacaccctggcacagtccaatctgaactggttcggcactcatctttcatgagatggatgtggtggcttttctcctttttcatcaagactcctcagcagggagcccagaccagcctgcactgtgccttaacagaaggtcttgagattctaagtgggaatcatttcagtgactgtcatgtggcatgggtctctgcccaagctcgtaatgagactatagcaaggcggctgtgggacgtcagttgtgacctgctgggcctcccaatagactaacaggcagtgcagttggacccaagagaagactgcagcagactacacagtacttcttgtcaaaatgattctccttcaaggttttcaaaacctttagcacaaagagagcaaaaccttccagccttgcctgcttggtgtccagttaaaactcagtgtactgccagattcgtctaaatgtctgtcatgtccagatttactttgcttctgttactgccagagttactagagatatcataataggataagaagaccctcatatgacctgcacagctcattttccttctgaaagaaactactacctaggagaatctaagctatagcagggatgatttatgcaaatttgaactagcttctttgttcacaattcagttcctcccaaccaaccagtcttcacttcaagagggccacactgcaacctcagcttaacatgaataacaaagactggctcaggagcagggcttgcccaggcatggtggatcaccggagtcagtagttcaagaccagcctggccaacatggtgaaaccccacctctactaaaaattgtgtatatctttgtgtgtcttcctgtttatgtgtgccaagggagtattttcacaaagttcaaaacagccacaataatcagagatggagcaaaccagtgccatccagtctttatgcaaatgaaatgctgcaaagggaagcagattctgtatatgttggtaactacccaccaagagcacatgggtagcagggaagaagtaaaaaaagagaaggagaatactggaagataatgcacaaaatgaagggactagttaaggattaactagccctttaaggattaactagttaaggattaatagcaaaagacattaaatatgctaacatagctatggaggaattgagggcaagcacccaggactgatgaggtcttaacaaaaaccagtgtggcaaa

SEQ ID NO: 8 - DNA, 1126 bp, Homo sapien
gctcggccaggctgctggtacctgcgtccgcccggcgagcaggacaggctgctttggtttgtgacctccaggcaggacggccatcctctccagaatgaagatcttcttgccagtgctgctggctgcccttctgggtgtggagcgagccagctcgctgatgtgcttctcctgcttgaaccagaagagcaatctgtactgcctgaagccgaccatctgctccgaccaggacaactactgcgtgactgtgtctgctagtgccggcattgggaatctcgtgacatttggccacagcctgagcaagacctgttccccggcctgccccatcccagaaggcgtcaatgttggtgtggcttccatgggcatcagctgctgccagagctttctgtgcaatttcagtgcggccgatggcgggctgcgggcaagcgtcaccctgctgggtgccgggctgctgctgagcctgctgccggccctgctgcggtttggcccctgaccgcccagaccctgtcccccgatcccccagctcaggaaggaaagcccagccctttctggatcccacagtgtatgggagcccctgactcctcacgtgcctgatctgtgcccttggtcccaggtcaggcccaccccctgcacctccacctgccccagcccctgcctctgccccaagtggggccagctgccctcacttctggggtggatgatgtgaccttccttgggggactgcggaagggacgagggttccctggagtcttacggtccaacatcaggaccaagtcccatggacatgctgacagggtccccagggagaccgtgtcagtagggatgtgtgcctggctgtgtacgtgggtgtgcagtgcacgtgagagcacgtggcggcttctgggggccatgtttggggagggaggtgtgccagcagcctggagagcctcagtccctgtagccccctgccctggcacagctgcatgcacttcaagggcagcctttgggggttggggtttctgccacttccgggtctaggccctgccccaaatccagccagtcctgccccagcccacccccacattggagccctcctgctgctttggtgcctcaaataaatacagatgtcccccaaaaaaaaaaaaaaaaa

SEQ ID NO: 9 - DNA, 1282 bp, Homo sapien
  Unsure 898, 1187, 1198, 1241, 1262, 1266, 1277, 1281: Unknown base
gaagtttctcactagggtcttctctggcccagcctttgactgaagctggtctggagacaggggcattagagaagtgactcatagatggcctaaagaagcggggccactcaaggacccaggacagagggaagagggccaacccagctggaccacaggcaaaccccattgcctttgagagaaagaagaggacccggtgaaacatgctgctgctgaagaaacacacggaggacatcagcagcgtctacgagatccgcgagaggctcggctcgggtgccttctccgaggtggtgctggcccaggagcggggctccgcacacctcgtggccctcaagtgcatccccaagaaggccctccggggcaaggaggccctggtggagaacgagatcgcagtgctccgtaggatcagtcaccccaacatcgtcgctctggaggatgtccacgagagcccttcccacctctacctggccatggaactggtgacgggtggcgagctgtttgaccgcatcatggagcgcggctcctacacagagaaggatgccagccatctggtgggtcaggtccttggcgccgtctcctacctgcacagcctggggatcgtgcaccgggacctcaagcccgaaaacctcctgtatgccacgccctttgaggactcgaagatcatggtctctgactttggactctccaaaatccaggctgggaacatgctaggcaccgcctgtgggacccctggatatgtggccccagagctcttggagcagaaaccctacgggaaggccgtagatgtgtgggccctgggcgtcatctcctacatcctgctgtgtgggtacccccccttctacgacgagagcgaccctgagctcttcagccagatcctgagggccagctatgagtttgactntcctttctgggatgacatctcagaatcaggcaaagactttattcggcaccttctggagcgagaccttcagaagaggttcacctgccaacaggccttgcgggacctttggatcttttgggacacaggctttggcagggacatcttagggtttgtcagtgagcagatccggaagaactttgcttggacacactggaagcgagccttcaatgccaccttgttcctgcgccacatccggaagctggggcagatcccagagggcgagggggcctctgagcagggcatggsccgncacagccactnaggccttcgtgctggccagccccccaagtggtgatgcccaggnagatgccgaggccaagtggantganccccagatttncttnc

SEQ ID NO: 10 - DNA, 3475 bp, Homo sapien
ggaacgagtgggaacgtagctggtcgcagagggcaccagcggctgcaggacttcaccaagggaccctgaggctcgtgagcagggacccgcggtgcgggttatgctgggggctcagatcaccgtagacaactggacactcaggaccacgccatggaggagctgcaggatgattatgaagacatgatggaggagaatctggagcaggaggaatatgaagacccagacatccccgagtcccagatggaggagccggcagctcacgacaccgaggcaacagccacagactaccacaccacatcacacccgggtacccacgaggtctatgtggagctgcaggagctggtgatggacgaaaagaaccaggagctgagatggatggaggcggcgcgctgggtgcaactggaggagaacctgggggagaatggggcctggggccgcccgcacctctctcacctcaccttctggagcctcctagagctgcgtagagtcttcaccaagggtactgtcctcctagacctgcaagagacctccctggctggagtggccaaccaactgctagacaggtttatctttgaagaccagatccggcctcaggaccgagaggagctgctccgggccctgctgcttaaacacagccacgctggagagctggaggccctggggggtgtgaagcctgcagtcctgacacgctctggggatccttcacagcctctgctcccccaacactcctcactggagacacagctcttctgtgagcagggagatgggggcacagaagggcactcaccatctggaattctggaaaagattcccccggattcagaggccacgttggtgctagtgggccgcgccgacttcctggagcagccggtgctgggcttcgtgaggctgcaggaggcagcggagctggaggcggtggagctgccggtgcctatacgcttcctctttgtgttgctgggacctgaggccccccacatcgattacacccagcttggccgggctgctgccaccctcatgtcagagagggtgttccgcatagatgcctacatggctcagagccgaggggagctgctgcactccctagagggcttcctggactgcagcctagtgctgcctcccaccgatgccccctccgagcaggcactgctcagtctggtgcctgtgcagagggagctacttcgaaggcgctatcagtccagccctgccaagccagactccagcttctacaagggcctagacttaaatgggggcccagatgaccctctgcagcagacaggccagctcttcgggggcctggtgcgtgatatccggcgccgctacccctattacctgagtgacatcacagatgcattcagcccccaggtcctggctgccgtcatcttcatctactttgctgcactgtcacccgccatcaccttcggcggcctcctgggagaaaagacccggaaccagatgggagtgtcggagctgctgatctccactgcagtgcagggcattctcttcgccctgctgggggctcagcccctgcttgtggtcggcttctcaggacccctgctggtgtttgaggaagccttcttctcgttctgcgagaccaacggtctagagtacatcgtgggccgcgtgtggatcggcttctggctcatcctgctggtggtgttggtggtggccttcgagggtagcttcctggtccgcttcatctcccgctatacccaggagatcttctccttcctcatttccctcatcttcatctatgagactttctccaagctgatcaagatcttccaggaccacccactacagaagacttataactacaacgtgttgatggtgcccaaacctcagggccccctgcccaacacagccctcctctcccttgtgctcatggccggtaccttcttctttgccatgatgctgcgcaagttcaagaacagctcctatttccctggcaagctgcgtcgggtcatcggggacttcggggtccccatctccatcctgatcatggtcctggtggatttcttcattcaggatacctacacccagaaactctcggtgcctgatggcttcaaggtgtccaactcctcagcccggggctgggtcatccacccactgggcttgcgttccgagtttcccatctggatgatgtttgcctccgccctgcctgctctgctggtcttcatcctcatattcctggagtctcagatcaccacgctgattgtcagcaaacctgagcgcaagatggtcaagggctccggcttccacctggacctgctgctggtagtaggcatgggtggggtggccgccctctttgggatgccctggctcagtgccaccaccgtgcgttccgtcacccatgccaacgccctcactgtcatgggcaaagccagcaccccaggggctgcagcccagatccaggaggtcaaagagcagcggatcagtggactcctggtcgctgtgcttgtgggcctgtccatcctcatggagcccatcctgtcccgcatccccctggctgtactgtttggcatcttcctctacatgggggtcacgtcgctcagcggcatccagctctttgaccgcatcttgcttctgttcaagccacccaagtatcacccagatgtgccctacgtcaagcgggtgaagacctggcgcatgcacttattcacgggcatccagatcatctgcctggcagtgctgtgggtggtgaagtccacgccggcctccctggccctgcccttcgtcctcatcctcactgtgccgctgcggcgcgtcctgctgccgctcatcttcaggaacgtggagcttcagtgtctggatgctgatgatgccaaggcaacctttgatgaggaggaaggtcgggatgaatacgacgaagtggccatgcctgtgtgaggggcgggcccaggccctagaccctcccccaccattccacatccccaccttccaaggaaaagcagaagttcatgggcacctcatggactccaggatcctcctggagcagcagctgaggccccagggctgtgggtggggaaggaaggcgtgtccaggagaccttccacaaagggtagcctggcttttctggctggggatggccgatggggcccacattagggggtttgttgcacagtccctcctgttgccacactttcactggggatcccgtgctggaagacttagatctgagccctccctcttcccagcacaggcaggggtagaagcaaaggcaggaggtgggtgagcgggtggggtgcttgctgtgtgaccttgggcaagtcccttgacctttccagcctatatttcctcttctgtaaaatgggtatattgatgataatacccacattacaggatggttactgaggaccaaagatacatgtaaaatagggctttgtaaactccacagggactgttctatagcagtcatcatttgtctttgaacgtacccaaggtcacatagctgggatttgaactgagccgtgcagct

SEQ ID NO: 11 - DNA, 2290 bp, Homo sapien
  Unsure 11, 30, 39, 45: Unknown base
ctcttttgctnggacttcactgtcactcangaaaaagcngtgaanctaaaacagaagaatcttagcactgagataagggagaacctgtcagagctccgtcaggagaattccaagttgacgttcaatcagctgctgacccgcttctctgcctacatggtagcctgggttgtctctacaggagtggccatagcctgctgtgcagccgtttattacctggctgagtacaacttagagttcctgaagacacacagtaaccctggggcggtgctgttactgcctttcgttgtgtcctgcattaatctggccgtgccatgcatctactccatgttcaggcttgtggagaggtacgagatgccacggcacgaagtctacgttctcctgatccgaaacatctttttgaaaatatcaatcattggcattctttgttactattggctcaacaccgtggccctgtctggtgaagagtgttgggaaaccctcattggccaggacatctaccggctccttctgatggattttgtgttctctttagtcaattccttcctgggggagtttctgaggagaatcattgggatgcaactgatcacaagtcttggccttcaggagtttgacattgccaggaacgttctagaactgatctatgcacaaactctggtgtggattggcatcttcttctgccccctgctgccctttatccaaatgattatgcttttcatcatgttctactccaaaaatatcagcctgatgatgaatttccagcctccgagcaaagcctggcgggcctcacagatgatgactttcttcatcttcttgctctttttcccatccttcaccggggtcttgtgcaccctggccatcaccatctggagattgaagccttcagctgactgtggcccttttcgaggtctgcctctcttcattcactccatctacagctggatcgacaccctaagtacacggcctggctacctgtgggttgtttggatctatcggaacctcattggaagtgtgcacttctttttcatcctcaccctcattgtgctaatcatcacctatctttactggcagatcacagagggaaggaagattatgataaggctgctccatgagcagatcattaatgagggcaaagataaaatgttcctgatagaaaaattgatcaagctgcaggatatggagaagaaagcaaaccccagctcacttgttctggaaaggagagaggtggagcaacaaggctttttgcatttgggggaacatgatggcagtcttgacttgcgatctagaagatcagttcaagaaggtaatccaagggcctgatgactcttttggtaaccagacaccaatcaaataaggggaggagatgaaaatggaatgatttcttccatgccacctgtgcctttaggaactgcccagaagaaaatccaaggctttagccaggagcggaaactgactaccatgtaattatcaaagtaaaattgggcattccatgctatttttaatacctggattgctgatttttcaagacaaaatacttggggttttccaataaagattgttgtaatattgaaatgagcctacaaaaacctaggaagagataactagggaataatgtatattatcttcaagaaatgtgtgcaggaatgattggttcttagaaatctctcctgccagacttcccagacctggcaaaggtttagaaactgttgctaagaaaagtggtccatcctgaataaacatgtaatactccagcagggatatgaagcctctgaattgtagaacctgcatttatttgtgactttgaactaaagacatcccccatgtcccaaaggtggaatacaaccagaggtctcatctctgaactttcttgcgtactgattacatgagtctttggagtcggggatggaggaggttctgcccctgtgaggtgttatacatgaccatcaaagtcctacgtcaagctagctttgcacagtggcagtaccgtagccaatgagatttatccgagacgcgattattgctaattggaaattttcccaataccccaccgtgatgacttgaaatataatcagcgctggcaatttttgacagtctctacggagactgaataagaaaaaagaaaagaaaagaaattagctgggtgcgatggcttatgcctgtaatcccggcactttgggaggctgaggcaagcggatcacttaatgtcaggagttcaagaccagcctggccaacatggtgaaaccccgtctctactaaggataaaaaaactggctgggcgtggtggtacatgcct

SEQ ID NO: 12 - DNA, 2148 bp, Homo sapien
gcttcagggtacagctcccccgcagccagaagccgggcctgcagcccctcagcaccgctccgggacaccccacccgcttcccaggcgtgacctgtcaacagcaacttcgcggtgtggtgaactctctgaggaaaaaccattttgattattactctcagacgtgcgtggcaacaagtgactgagacctagaaatccaagcgttggaggtcctgaggccagcctaagtcgcttcaaaatggaacgaaggcgtttgtggggttccattcagagccgatacatcagcatgagtgtgtggacaagcccacggagacttgtggagctggcagggcagagcctgctgaaggatgaggccctggccattgccgccctggagttgctgcccagggagctcttcccgccactcttcatggcagcctttgacgggagacacagccagaccctgaaggcaatggtgcaggcctggcccttcacctgcctccctctgggagtgctgatgaagggacaacatcttcacctggagaccttcaaagctgtgcttgatggacttgatgtgctccttgcccaggaggttcgccccaggaggtggaaacttcaagtgctggatttacggaagaactctcatcaggacttctggactgtatggtctggaaacagggccagtctgtactcatttccagagccagaagcagctcagcccatgacaaagaagcgaaaagtagatggtttgagcacagaggcagagcagcccttcattccagtagaggtgctcgtagacctgttcctcaaggaaggtgcctgtgatgaattgttctcctacctcattgagaaagtgaagcgaaagaaaaatgtactacgcctgtgctgtaagaagctgaagatttttgcaatgcccatgcaggatatcaagatgatcctgaaaatggtgcagctggactctattgaagatttggaagtgacttgtacctggaagctacccaccttggcgaaattttctccttacctgggccagatgattaatctgcgtagactcctcctctcccacatccatgcatcttcctacatttccccggagaaggaagagcagtatatcgcccagttcacctctcagttcctcagtctgcagtgcctgcaggctctctatgtggactctttatttttccttagaggccgcctggatcagttgctcaggcacgtgatgaaccccttggaaaccctctcaataactaactgccggctttcggaaggggatgtgatgcatctgtcccagagtcccagcgtcagtcagctaagtgtcctgagtctaagtggggtcatgctgaccgatgtaagtcccgagcccctccaagctctgctggagagagcctctgccaccctccaggacctggtctttgatgagtgtgggatcacggatgatcagctccttgccctcctgccttccctgagccactgctcccagcttacaaccttaagcttctacgggaattccatctccatatctgccttgcagagtctcctgcagcacctcatcgggctgagcaatctgacccacgtgctgtatcctgtccccctggagagttatgaggacatccatggtaccctccacctggagaggcttgcctatctgcatgccaggctcagggagttgctgtgtgagttggggcggcccagcatggtctggcttagtgccaacccctgtcctcactgtggggacagaaccttctatgacccggagcccatcctgtgcccctgtttcatgcctaactagctgggtgcacatatcaaatgcttcattctgcatacttggacactaaagccaggatgtgcatgcatcttgaagcaacaaagcagccacagtttcagacaaatgttcagtgtgagtgaggaaaacatgttcagtgaggaaaaaacattcagacaaatgttcagtgaggaaaaaaaggggaagttggggataggcagatgttgacttgaggagttaatgtgatctttggggagatacatcttatagagttagaaatagaatctgaatttctaaagggagattctggcttgggaagtacatgtaggagttaatccctgtgtagactgttgtaaagaaactgttgaaaataaagagaagcaatgtgaagcaaaaaaaaaaaaaaaaaa

SEQ ID NO: 13 - DNA, 3604 bp, Homo sapien
  Unsure 3505, 3583: Unknown base
gggcaggctcagtgtgagtgaactggaggcttctctacaacatgacccaaaggagcattgcaggtcctatttgcaacctgaagtttgtgactctcctggttgccttaagttcagaactcccattcctgggagctggagtacagcttcaagacaatgggtataatggattgctcattgccattaatcctcaggtacctgagaatcagaacctcatctcaaacattaaggaaatgataactgaagcttcattttacctatttaatgctaccaagagaagagtatttttcagaaatataaagattttaatacctgccacatggaaagctaataataacagcaaaataaaacaagaatcatatgaaaaggcaaatgtcatagtgactgactggtatggggcacatggagatgatccatacaccctacaatacagagggtgtggaaaagagggaaaatacattcatttcacacctaatttcctactgaatgataacttaacagctggctacggatcacgaggccgagtgtttgtccatgaatgggcccacctccgttggggtgtgttcgatgagtatatcaatgacaaacctttctacataaatgggcaaaatcaaattaaagtgacaaggtgttcatctgacatcacaggcatttttgtgtgtgaaaaaggtccttgcccccaagaaaactgtattattagtaagctttttaaagaaggatgcacctttatctacaatagcacccaaaatgcaactgcatcaataatgttcatgcaaagtttatcttctgtggttgaattttgtaatgcaagtacccacaaccaagaagcaccaaacctacagaaccagatgtgcagcctcagaagtgcatgggatgtaatcacagactctgctgactttcaccacagctttcccatgaatgggactgagcttccacctcctcccacattctcgcttgtacaggctggcgacaaagtggtctgtttagtgctggatgtgtccagcaagatggcagaggctgacagactccttcaactacaacaagccgcagaattttatttgatgcagattgttgaaattcataccttcgtgggcattgccagtttcgacagcaaaggagagatcagagcccagctacaccaaattaacagcaatgatgatcgaaagttgctggtttcatatctgcccaccactgtatcagctaaaacagacatcagcatttgttcagggcttaagaaaggatttgaggtggttgaaaaactgaatggaaaagcttatggctctgtgatgatattagtgaccagcggagatgataagcttcttggcaattgcttacccactgtgctcagcagtggttcaacaattcactccattgccctgggttcatctgcagccccaaatctggaggaattatcacgtcttacaggaggtttaaagttctttgttccagatatatcaaactccaatagcatgattgatgctttcagtagaatttcctctggaactggagacattttccagcaacatattcagcttgaaagtacaggtgaaaatgtcaaacctcaccatcaattgaaaaacacagtgactgtggataatactgtgggcaacgacactatgtttctagttacgtggcaggccagtggtcctcctgagattatattatttgatcctgatggacgaaaatactacacaaataattttatcaccaatctaacttttcggacagctagtctttggattccaggaacagctaagcctgggcactggacttacaccctgaacaatacccatcattctctgcaagccctgaaagtgacagtgacctctcgcgcctccaactcagctgtgcccccagccactgtggaagcctttgtggaaagagacagcctccattttcctcatcctgtgatgatttatgccaatgtgaaacagggattttatcccattcttaatgccactgtcactgccacagttgagccagagactggagatcctgttacgctgagactccttgatgatggagcaggtgctgatgttataaaaaatgatggaatttactcgaggtattttttctcctttgctgcaaatggtagatatagcttgaaagtgcatgtcaatcactctcccagcataagcaccccagcccactctattccagggagtcatgctatgtatgtaccaggttacacagcaaacggtaatattcagatgaatgctccaaggaaatcagtaggcagaaatgaggaggagcgaaagtggggctttagccgagtcagctcaggaggctccttttcagtgctgggagttccagctggcccccaccctgatgtgtttccaccatgcaaaattattgacctggaagctgtaaaagtagaagaggaattgaccctatcttggacagcacctggagaagactttgatcagggccaggctacaagctatgaaataagaatgagtaaaagtctacagaatatccaagatgactttaacaatgctattttagtaaatacatcaaagcgaaatcctcagcaagctggcatcagggagatatttacgttctcaccccaaatttccacgaatggacctgaacatcagccaaatggagaaacacatgaaagccacagaatttatgttgcaatacgagcaatggataggaactccttacagtctgctgtatctaacattgcccaggcgcctctgtttattccccccaattctgatcctgtacctgccagagattatcttatattgaaaggagttttaacagcaatgggtttgataggaatcatttgccttattatagttgtgacacatcatactttaagcaggaaaaagagagcagacaagaaagagaatggaacaaaattattataaataaatatccaaagtgtcttccttcttagatataagacccatggccttcgactacaaaaacatactaacaaagtcaaattaacatcaaaactgtattaaaatgcattgagtttttgtacaatacagataagatttttacatggtagatcaacaattctttttgggggtagattagaaaacccttacactttggctatgaacaaataataaaaattattctttaaagtaatgtctttaaaggcaaagggaagggtaaagtcggaccagtgtcaaggaaagtttgttttattgaggtggaaaaatagccccaagcagagaaaaggagggtaggtctgcattataactgtctgtgtgaagcaatcatttagttactttgattaatttttcttttctccttatctgtgcagtacaggttgcttgtttacatgaagatcatgctatattttatatatgtagcccctaatgcaaagctctttacctcttgctattttgttatatatatttcagatgacatctccctgctaatgctcagagatcttttttcactgtaagaggtaacctttaacaatatgggtattacctttgtctcttcataccggttttatgacaaaggtctattgaatttatttgtntgtaagtttctactcccatcaaagcagctttctaagtttattgccttgggttattatggaatgatagttatagccccntataatgccttacctaggaaa

SEQ ID NO: 14 - DNA, 2479 bp, Homo sapien
gtcatattgaacattccagatacctatcattactcgatgctgttgataacagcaagatggctttgaactcagggtcaccaccagctattggaccttactatgaaaaccatggataccaaccggaaaacccctatcccgcacagcccactgtggtccccactgtctacgaggtgcatccggctcagtactacccgtcccccgtgccccagtacgccccgagggtcctgacgcaggcttccaaccccgtcgtctgcacgcagcccaaatccccatccgggacagtgtgcacctcaaagactaagaaagcactgtgcatcaccttgaccctggggaccttcctcgtgggagctgcgctggccgctggcctactctggaagttcatgggcagcaagtgctccaactctgggatagagtgcgactcctcaggtacctgcatcaacccctctaactggtgtgatggcgtgtcacactgccccggcggggaggacgagaatcggtgtgttcgcctctacggaccaaacttcatccttcagatgtactcatctcagaggaagtcctggcaccctgtgtgccaagacgactggaacgagaactacgggcgggcggcctgcagggacatgggctataagaataatttttactctagccaaggaatagtggatgacagcggatccaccagctttatgaaactgaacacaagtgccggcaatgtcgatatctataaaaaactgtaccacagtgatgcctgttcttcaaaagcagtggtttctttacgctgtttagcctgcggggtcaacttgaactcaagccgccagagcaggatcgtgggcggtgagagcgcgctcccgggggcctggccctggcaggtcagcctgcacgtccagaacgtccacgtgtgcggaggctccatcatcacccccgagtggatcgtgacagccgcccactgcgtggaaaaacctcttaacaatccatggcattggacggcatttgcggggattttgagacaatctttcatgttctatggagccggataccaagtacaaaaagtgatttctcatccaaattatgactccaagaccaagaacaatgacattgcgctgatgaagctgcagaagcctctgactttcaacgacctagtgaaaccagtgtgtctgcccaacccaggcatgatgctgcagccagaacagctctgctggatttccgggtggggggccaccgaggagaaagggaagacctcagaagtgctgaacgctgccaaggtgcttctcattgagacacagagatgcaacagcagatatgtctatgacaacctgatcacaccagccatgatctgtgccggcttcctgcaggggaacgtcgattcttgccagggtgacagtggagggcctctggtcacttcgaacaacaatatctggtggctgataggggatacaagctggggttctggctgtgccaaagcttacagaccaggagtgtacgggaatgtgatggtattcacggactggatttatcgacaaatgaaggcaaacggctaatccacatggtcttcgtccttgacgtcgttttacaagaaaacaatggggctggttttgcttccccgtgcatgatttactcttagagatgattcagaggtcacttcatttttattaaacagtgaacttgtctggctttggcactctctgccatactgtgcaggctgcagtggctcccctgcccagcctgctctccctaaccccttgtccgcaaggggtgatggccggctggttgtgggcactggcggtcaattgtggaaggaagagggttggaggctgcccccattgagatcttcctgctgagtcctttccaggggccaattttggatgagcatggagctgtcacttctcagctgctggatgacttgagatgaaaaaggagagacatggaaagggagacagccaggtggcacctgcagcggctgccctctggggccacttggtagtgtccccagcctacttcacaaggggattttgctgatgggttcttagagccttagcagccctggatggtggccagaaataaagggaccagcccttcatgggtggtgacgtggtagtcacttgtaaggggaacagaaacatttttgttcttatggggtgagaatatagacagtgcccttggtgcgagggaagcaattgaaaaggaacttgccctgagcactcctggtgcaggtctccacctgcacattgggtggggctcctgggagggagactcagccttcctcctcatcctccctgaccctgctcctagcaccctggagagtgaatgccccttggtccctggcagggcgccaagtttggcaccatgtcggcctcttcaggcctgatagtcattggaaattgaggtccatgggggaaatcaaggatgctcagtttaaggtacactgtttccatgttatgtttctacacattgatggtggtgaccctgagttcaaagccatctt

SEQ ID NO: 15 - DNA, 969 bp, Homo sapien
ggatttccgggctccatggcaagatcccttctcctgcccctgcagatcctactgctatccttagccttggaaactgcaggagaagaagcccagggtgacaagattattgatggcgccccatgtgcaagaggctcccacccatggcaggtggccctgctcagtggcaatcagctccactgcggaggcgtcctggtcaatgagcgctgggtgctcactgccgcccactgcaagatgaatgagtacaccgtgcacctgggcagtgatacgctgggcgacaggagagctcagaggatcaaggcctcgaagtcattccgccaccccggctactccacacagacccatgttaatgacctcatgctcgtgaagctcaatagccaggccaggctgtcatccatggtgaagaaagtcaggctgccctcccgctgcgaaccccctggaaccacctgtactgtctccggctggggcactaccacgagcccagatgtgacctttccctctgacctcatgtgcgtggatgtcaagctcatctccccccaggactgcacgaaggtttacaaggacttactggaaaattccatgctgtgcgctggcatccccgactccaagaaaaacgcctgcaatggtgactcagggggaccgttggtgtgcagaggtaccctgcaaggtctggtgtcctggggaactttcccttgcggccaacccaatgacccaggagtctacactcaagtgtgcaagttcaccaagtggataaatgacaccatgaaaaagcatcgctaacgccacactgagttaattaactgtgtgcttccaacagaaaatgcacaggagtgaggacgccgatgacctatgaagtcaaatttgactttacctttcctcaaagatatatttaaacctcatgccctgttgataaaccaatcaaattggtaaagacctaaaaccaaaacaaataaagaaacacaaaaccctcaa

SEQ ID NO: 16 - DNA, 1195 bp, Homo sapien
ccgagactcacggtcaagctaaggcgaagagtgggtggctgaagccatactattttatagaattaatggaaagcagaaaagacatcacaaaccaagaagaactttggaaaatgaagcctaggagaaatttagaagaagacgattatttgcataaggacacgggagagaccagcatgctaaaaagacctgtgcttttgcatttgcaccaaacagcccatgctgatgaatttgactgcccttcagaacttcagcacacacaggaactctttccacagtggcacttgccaattaaaatagctgctattatagcatctctgacttttctttacactcttctgagggaagtaattcaccctttagcaacttcccatcaacaatatttttataaaattccaatcctggtcatcaacaaagtcttgccaatggtttccatcactctcttggcattggtttacctgccaggtgtgatagcagcaattgtccaacttcataatggaaccaagtataagaagtttccacattggttggataagtggatgttaacaagaaagcagtttgggcttctcagtttcttttttgctgtactgcatgcaatttatagtctgtcttacccaatgaggcgatcctacagatacaagttgctaaactgggcatatcaacaggtccaacaaaataaagaagatgcctggattgagcatgatgtttggagaatggagatttatgtgtctctgggaattgtgggattggcaatactggctctgttggctgtgacatctattccatctgtgagtgactctttgacatggagagaatttcactatattcagagcaagctaggaattgtttcccttctactgggcacaatacacgcattgatttttgcctggaataagtggatagatataaaacaatttgtatggtatacacctccaacttttatgatagctgttttccttccaattgttgtcctgatatttaaaagcatactattcctgccatgcttgaggaagaagatactgaagattagacatggttgggaagacgtcaccaaaattaacaaaactgagatatgttcccagttgtagaattactgtttacacacatttttgttcaatattgatatattttatcaccaacatttcaagtttgtatttgttaataaaatgattattcaaggaaaaaaaaaaaaaaaaaa

SEQ ID NO: 17 - DNA, 6255 bp, Homo sapien
ggtggagacaccgcctcagggctcggtgcacagtggacatttggggagcgttgtgggtgacccccacacaggcactgggaatgcaggggagagggggccaagggggaaaggggccagagtgttggctttggattcaggagggatggattccagtcctagcttgccacttattaggactcctgagagcagcctccatgaggccctggaccagtgcatgaccgccctggacctcttcctcaccaaccagttctcagaagcactcagctacctcaagcccagaaccaaggaaagcatgtaccactcactgacatatgccaccatcctggagatgcaggccatgatgacctttgaccctcaggacatcctgcttgccggcaacatgatgaaggaggcacagatgctgtgtcagaggcaccggaggaagtcttctgtaacagattccttcagcagcctggtgaaccgccccacgctgggccaattcactgaagaggaaatccacgctgaggtctgctatgcagagtgcctgctgcagcgagcagccctgaccttcctgcagggttcctcacacggaggggcagtcaggcccagagccttgcatgatccctctcacgcctgcagctgcccacctgggccaggccgtcagcatcttttcctcctgcaggacgagaacatggtgagcttcatcaaaggcggcatcaaagttcgaaacagctaccagacctacaaggagctggacagccttgttcagtcctcacaatactgcaagggtgagaaccacccgcactttgaaggaggagtgaagcttggtgtaggggccttcaacctgacactgtccatgcttcctactaggatcctgaggctgttggagtttgtggggttttcaggaaacaaggactatgggctgctgcagctggaggagggagcgtcagggcacagcttccgctctgtgctctgtgtcatgctcctgctgtgctaccacaccttcctcaccttcgtgctcggtactgggaacgtcaacatcgaggaggccgagaagctcttgaagccctacctgaaccggtaccctaagggtgccatcttcctgttctttgcagggaggattgaagtcattaaaggcaacattgatgcagtgagtgatgggggtccgggccggggctggggatccctcggggtctcccagaccagcaggaagtcaggcacatgtgacatactcagggacaggatagactgggggcggggggggggccaagagagaaccaaccagagagcaggggcaggagaggcccttctggcagagcagcctgggaagacaagggaggaggaggcatttgtggtgcctgggattttgactgggagatataggactgcagcattgcagtggagggaggtggagggaggtgcttgagggaggcagaggttaggaaagcccatctgtttagggcatgacgattaggctggagtctggtacctcccctccattatagctctctcctgctctttcattttgttactaaaaaccagagtcctaggcgggggctgtatttgagcccaacgtcatgtaagacttaggaggtaaaaccaggactggaggccagatctcctggctcctggggccccacctgagcctagcacagggctggaccactatgccctggaggagtcccggtctgctgtggtgttgggaggttcggaggatgcagaggggttggggctgggtgggcacccgtcaggctgaccagaaggtgcctgcaggccatccggcgtttcgaggagtgctgtgaggcccagcagcactggaagcagttccaccacatgtgctactgggagctgatgtggtgcttcacctacaagggccagtggaagatgtcctacttctacgccgacctgctcagcaaggagaactgctggtccaaggtgggctgatgccacgtgttaggggcattgggtgaccagggctgactgtgtgcctccagaccacgggccaaatccctaactgaacacagatgtctcagctggaatctaaacataaccttaaattctaataggactcaggcttggaaggaactaaagaccacaagagaaacttctgaaccacaatgtgtcacaaagagatttctagtcacaaaggacagaaacatggctccctctgtccagtagaactgtttctgtggtagaaatgttctacttatgcactgcccaaatatggtagtcaccagccacatgtgcacaatgagcacatgaaatgtgcctagtgcaactgggaaactgattgttttcagttttatttaattttaattaactaaatgttaaatttaaatagccatgtagggcttgtggccactatattggactatgcaggtccaaaacacaaaaggctcatataactgaacattcttggcacatccgacttcaggtagggctggatccaggaattcaaatgatgtcgtctggcttggtctttccatttgtggctgtgctctctcctatgacatctttgtttctgctgcatctttgcaggaaggttctctccatgtgacaggcaaggtggccacgggctgcttctactcatatcctccccttggtttcaaccagagtcccacagtttgagcctcactggtctgacttgtcacctgccaatgcctggaacagaggggtgggaagattcctcatgggctgagagtaggagaggggtggttccacagaagaaaatgatgcacccagaaatagtggagggattaacaagatgccatacaggcaaaacaaagccaaacagatgcccgcctaccaaagatgaaatttatcatggtaagtattgaaataagtgttagcttgtaccatcatagtaatgatagtgcagaaattggaaccaagagtcttacaaccacctagctcagcaaacgtctaatctgttatttgtaaatacacaggacatgtgtcttcatggcttcatcccctgcccatagcagacattgctaatcaatcctctgccatgagcctagctgtgaccttagataccttccctgcaaagctccaggcagccgttagaactgacccacattggcacctgttaggagacctgtcatctgcatctggtccctccccctcctctgcatggaggtctcttccgtagccctgcctggggaccaagctgaaggggaattctctgggtctggggcaggtggggctggggaagggagcaggcttctactgagctctcaacatgtctggcacctgtcatgtcctccacaccacacccagtgaggagaagttattatctccattgggcacatgagggccactgatgctaagcgaggactgtgactttcccacccacatggctgttggtgacagacaccggatttgaggacagtcctgtgtgactcagaggcctctgcttctctcttgctcctagagtcctcctgaggagtcggggcttgccctgagcccaccctgctgttgaaggtgcttcctcaggcccagctcccatggcccccacaccccctcctcatcacctcctactcccaaaaaggacaaagcctcagggaaccttttttctttttttagagacagggtcttgctatgttggtcaggctagtcttgaactcctgggcccaagcaatcttcccacctctgcctcctaaagtgctgggattctgggccttagggaacctttttgaactgaaagtgactctcgaagccttcctgtagagtgaggtgggtggctggggctaaccatatggggaaggagagacctggtgggggcacacagctgctatatagaggaacagaaggtgggccaggcctcccagctgtcaggaaatctggctcagtccccagaccgctgtgtggctttggggtggccagtccctctctctctgcaacactctcctcatgaggacttctgtgaaaaatgggggttgtaaccctctgagttctggggccccacccatttctaatctccagaacttggccaccacagactccaccaacttctagtcctggggcctgggcctctggccattgccataggcaccacctgctctgtgcaggcagcgcccccctctgccaggatcctccgaggtcagctgctgggtctgacccgcagaccctggctgagcgacggatgaacggagtatgcagacacaggcttgcctgtcagcagatgggggacccctgccagagtcagcagcggcccccataagcctgccacgcttgcatttatttagtacagatgtaatgacaaaggcctaaagcaaactccatttgtgggtaattaacattgtcgcccccccagaaagagcagtcctccgcatgatgattaaaggccaggttccgaggcctaagtaaaccaacttatctagatcaattcccttacttcttgttatctactctgagagaattcagctgccttcagccaaatcctttcccgaagcttttgcaaaacctccgagccttccaaggtttgcttctttctgtaatttttctcaccaccctgacctatctcctgcagtcagccctgtggaggcctttgtgtttcccccagtgctggcagcctagaggctgagatggccagaaacaaggtggtgacagtggcgtgctcagggcttgggaaacccaaggagctaaaggcatgcccaggcaaccaaagaggacaggaaggcttctgaggagagacctctgaggtgggtcttggagaggaaggacttagggaggcagagtggaggaagtgagaggacaccccaagccaagagggcggcaggaccaaaggctcagaagccagggcgctgcagaggggctgtgtgccacagggtgaagagtttgtgtggcagaagggcagggggcttgcatcaggggtgacagctgctcttttgtcccagcatagcccctgtacatccctggagagctggggcgtccacaactctaagtcacagcccccatcctaaccctggtggtgcagtgagggtgagctgtctgtgggcaggagggaagactcttggagatgagcctggtgaagggataatggcatcccgggccgaggagcagcacaggcagaggcctggggagagtttaaggagtgtaggggaggaaatggcagaagatgagccagaaaaagaaaggttagggcaggtcctggaggacatgagtggctgtttgggctttatccagcagtgggggagccttggcaggcttgtggcttagataggtgctttagaaagcccaccagcagttgctgggccaccccgctggctgggtcctgttctaaggcaggaaatacaagcatgagcaggaaaagaccccctcaaggctcacgtcctagtggggagacaagaaacacagatgggcaatataacacgatgtctggttccagtaagtgcagtgaagaacaagcgaggctggatgcagggagtgatgggaggggctttgtaaggggaggtcgggggaagcctgtctcagaggacaccagaatggagcgcaggagcagcacgtggcagtcacatggcaggccgttagggcagagggagctgggcagggcacagcagggcaggagtgtgtttgatgtgtcctgggaaccgccctgaggccgtcgtgtggctggagtgctgcaggtgtcaaggaaattgtaggagatgtctcctgagtgtgatggaatataaccagatttccagaaggaactgacatgatctgacttaaaaaggtcagtgtgcgaaatggcttgcaggggacaggagtgggagcagggagataggagacaatgtgtaccaggacagcagaaagacatcccgggtagcctggaacagggagacggtgtggagatggtggcagtccgataatgagagccgtagggcaaggccagcaggatcctagagtgagacgggaggtaaagtcaccgggacttggtgtctccacgtcaggggcaggggaaagggagaggacaagggtgacccgggaggttaaagatgggaccggggccagacgcagtggctcatgcctgtaatcctagcactttgggaggctgaggcgggcggatagcttgaggtcaggagtttgaaaccagcctggccaacatggtgaaaccccgtctctactaaaatatacaaaaattagcctggcgtggtggtgcatgcctgcagtcccagctattcaggaggctgaggcaacaagaatcgcttgaacctgggaggcggaggttgcagtgagccgagatcgcgccatagcactccagccttagcctgggcgacagagcgagaccacatc

SEQ ID NO: 18 - DNA, 2465 bp, Homo sapien
gagcagcgcggcctgacgggaccaaggcggcgggagtctgcggtcgttccctcggctgtggaccgggcggcacgcacgcggtgcagggtaacatggcggatgcggaagtaattattttgccaaagaaacataagaagaaaaaggagcggaagtcattgccagaagaagatgtagccgaaatacaacacgctgaagaatttcttatcaaacctgaatccaaagttgctaagttggacacgtctcagtggccccttttgctaaagaattttgataagctgaatgtaaggacaacacactatacacctcttgcatgtggttcaaatcctctgaagagagagattggggactatatcaggacaggtttcattaatcttgacaagccctctaacccctcttcccatgaggtggtagcctggattcgacggatacttcgggtggagaagacagggcacagtggtactctggatcccaaggtgactggttgtttaatcgtgtgcatagaacgagccactcgcttggtgaagtcacaacagagtgcaggcaaagagtatgtggggattgtccggctgcacaatgctattgaaggggggacccagctttctagggccctagaaactctgacaggtgccttattccagcgacccccacttattgctgcagtaaagaggcagctccgagtgaggaccatctacgagagcaaaatgattgaatacgatcctgaaagaagattaggaatcttttgggtgagttgtgaggctggcacctacattcggacattatgtgtgcaccttggtttgttattgggagttggtggtcagatgcaggagcttcggagggttcgttctggagtcatgagtgaaaaggaccacatggtgacaatgcatgatgtgcttgatgctcagtggctgtatgataaccacaaggatgagagttacctgcggcgagttgtttaccctttggaaaagctgttgacatctcataaacggctggttatgaaagacagtgcagtaaatgccatctgctatggggccaagattatgcttccaggtgttcttcgatatgaggacggcattgaggtcaatcaggagattgtggttatcaccaccaaaggagaagcaatctgcatggctattgcattaatgaccacagcggtcatctctacctgcgaccatggtatagtagccaagatcaagagagtgatcatggagagagacacttaccctcggaagtggggtttaggtccaaaggcaagtcagaagaagctgatgatcaagcagggccttctggacaagcatgggaagcccacagacagcacacctgccacctggaagcaggagtatgttgactacagtgagtctgccaaaaaagaggtggttgctgaagtggtaaaagccccgcaggtagttgccgaagcagcaaaaactgcgaagcggaagcgagagagtgagagtgaaagtgacgagactcctccagcagctcctcagttgatcaagaaggaaaagaagaagagtaagaaggacaagaaggccaaagctggtctggagagcggggccgagcctggagatggggacagtgataccaccaagaagaagaagaagaagaagaaagcaaaagaggtagaattggtttctgagtagtgaaggccacttgaagctggaggagaaactaaagccttattgagaaaacatgttatagatccttttgttgctgagagagtggaacataggtcctagacagggtgaagagttctggcacattttagctgctactttgagacctcggtgatgttacctggtgtggtcatcccatcttgtcctgttttaaggatatgggtggtgaaagatgaaagaggcagagtttatcccaatgacttctctgtttgagttgggaagcctcaccttcagacccagtaactgtccgcagctgtctgctagtggttgtcttaacatcgtagtcctagtttgcattttttaaatcccctctgtttaaaaggtttgtaaaacaaaaacaaaaaactaagtctgctcagtgaaatgctgtagaaccctaaataagtggtagaagagtgtcactgaattttgtctctgaattcagtataactgagttttgtccatgctggtgtctgggttataggcctgatgggcctggtagttttccatcttgttctggcctagaggtcagtcctttgcacttcctcaaagcttgtgtacagtgctcacctaaatccatctgactacttgttcctgtgccctcttgttttaggcctcgtttacttttaaaaaatgaaattgttcattgctgggagaagaatgttgtaatttttacttattaaagtcaacttgttaagttttttatgtattcctgttgggttttcttgttgatctcatgctagcagagcaaaaattgtaaaatattttgattaaaaatctagggacctttatgtcctatttggaattcgatatcaa

SEQ ID NO: 19 - DNA, 2289 bp, Homo sapien
ggcacgaggctacaaagcaggaaagtatgcttgggagaggccaagtgagtggggaatcagcccaaagccaggcgtccagggtctccctcacctgaagctgactttttccccaccttggacagagggcgggagatgccatccccactgaacccagtgctttcaccagccatattagctcccactcaccccccgtcgtggaagcctcggccgtcacacctgcagggccggggcgtgcatggcctcagggatggcctgttcagctgctgggtgactcgggtccaggtgcctcaccacctgctgagctctgtgtgatttctggacgcttctgctcgttgcctttgggctcagtgaagagtctggagtttatctggagtgaggtggccggttcttggtgggatctgagcaggacagcgtctggctccttccctcggctcatggccctcagaatctgcgtcacatacaccccagctctcccgataggtctctgcactcgctgttgcctctgcctggaacagtctccctcctggtgtcattgtctccgtggtgtgtccttcctgaccttccacctccaccagtctgtcccccttggggacagggactcgttgctcatgttcacccggcaggctggacacttcgtggagggctccaaagctggcagatcccggggccgcctctgtctctcccaggccctgcgtgttgcggtgagaggagcatttgtgtctctgtggtttgctgctggagctggtgaccgggagagaaacaagggagacaagggtgcccagacaggtgcggggctcagccaggaggcagaagacgtggacgtgtcccgggccaggagggtcacagatgcaccacaaggcactctgtgtggcactgggaacaggaattctgggagtcagtctgcaagggcggtgggcgttgctcacctgggagaagcctttagagtgggcgttgagcaggccattagctcgtgccctgaggaggtgcatgggcggcatgggctctccatggaaattatgtgggcgcgaatggatgtggctctgcgctcacctgggcgaggacttctggccggtgccggggcactctgcgtgaccctggcagaatcgagctgccctgactatgaaaggggaagaagagcatgcctgaccctccaccggcaccccacccctcactgctccacctggggcctgcctctgcgggtggctgggtcctggctgactgttgtgactgttgaggccctgggggggtggcgcatgggagttaggaggactggccaggtggggcccactatgcacccacccccagtgtcaggtgcttctcctctcctcctccaccacctcctcctcctcctcctcatcatcatcctcacttgttgaggacgtcctgtgtgccaagtggtttatatgcccagcctcatttaatcctcagaatgactccatgaggtagctactaaaaccccccacttaacagatgaggaaactgaggcctagagaagctcaataagttgcctaagttccaagtttcctctcccaactctcctaccctctcctcttccttctcctttctcccattcttccctgcctcttccctaactagacaattttttattgagtgtctcccaggtgcaggcatgagccaggtgctgggaaaatcatgataacccagctccttctggtcattttctcagctggttagaggctgggaggacacgcaagttcagctccagccgactggggcattggtggtagcccctggagacattgtgcaatggggctacgaggctgcatctggctccagggaagcgtgttgcaatccatgagtgatgtctgccatgcgtacaggcatggagagtgaggcgcctgtactgtctttctgtagaccctagactggtggggcctctgaaatgcatccagacactgtgctgggtgtgttgcatggccctcccaaccaattcagtatttttctccccattttccagggagaaatctaaggcgtcagaatgtaaggttcttattggaacccaggctccagggtccctggttttctgtgacatcatgctgcaggaccctgtttctctctttgctttggctgctggggagctcagaagggagctttaggcttgctctcagtcaccacattagctcaggggtttgggcatttttgtcgccgtctcctttgggctctgtctcctccctgctgtgcttcctgaggagcaggccggatgtaagttatcaactataaataaaaccaagacttccgttctggctctcaaaaaaaaaaaaaaaaaaa

SEQ ID NO: 20 - DNA, 2835 bp, Homo sapien
gtacagaagcaaaatcaaacctgctatttcagcactcctgtttttaacttggtgtctttagtgcttggattggtgggatgtttcggaatgggcattgtcgccaattttcaggagttagctgtgccagtggttcatgacgggggcgctcttttggcctttgtctgtggtgtcgtgtacacgctcctacagtccatcatctcttacaaatcatgtccccagtggaacagtctctcgacatgccacatacggatggtcatctctgccgtttcttgcgcagctgtcatccccatgattgtctgtgcttcactaatttccataaccaagctggagtggaatccaagagaaaaggattatgtatatcacgtagtgagtgcgatctgtgaatggacagtggcctttggttttattttctacttcctaactttcatccaagatttccagagtgtcaccctaaggatatccacagaaatcaatggtgatatttgaagaaagaagaattcagtctcactcagtgaatgtcgcaggccatttctaaaagtgctacagaggacagacagggttttgaggccaccctgattattgggatgcatctgcagcacatccaggacttgaatttcattacgagttcctaatagttgtatttctaaagatgtgtttcctagagaatgtacagccttatgacactgtagtgatgtttttataattttctaagtagatttttttatattaacaaattcatatacagaaaaaataaggtgttacaaaaaatggagagctcttatttttgtacagattctgtcgtttttttttatttgtgtgagatttatggaaatacactaaatgagtaattcaggttcagtacatttattacaaagtgaaatcaggggatattcatttgtaaattttattcttagtgaatgaactgtataattttttttatcaggagagcacttataaaattcaatttataaagatcatatacccaaatcataaagatttagttgatacattaacactaagatactctgatttttagcgaactaaacaaagtgcttctactgagaggcctttataccaccatgtacagtaactctaagtgaatacggaagaccttggttttgaaattctgccaccttgtttctccctgctcatgaggtcgcaccttttgctcttgctgctaattgcccattcgtagtgggtgtaatgccaggtggaatggtttcaacaagtcaggtgaaaaccatcctttattgttgctggcacaacttgatatatagtctgactcagaactgaagctcacatctcaaattcatttcatgccagtaaatgtggcaaagagaagaaaggcccaagagcgagacaagaagaatggagaagggggcagccaagaagaacttctgggttcagggtactgtttatttgctccttctcttcatgcctgtggctggatgtcccacaacactataagaaatataagtcaagccctttgtgttaagcaagaactacagactccatcttttcacccaaatcatgaatgaccaataaaaagcaagttattccagaggaagaagcagcccttgaaatgttaaggcttaggcttgaaaggtgaagagcaggaattctctctttcaaatcctagagcataaacccatgtgtggccaagtgagatcagccctcaagggcacatgccaagggcagagcagcccatgtagacagcttcggagggcatgggggtgtagggagttcggggtagctcctcattaactatttgttgggtgagtaaaggggtgaggctcagtggcaggtacctctgcaatgacaagctgcctcccctctatgtgtttagcatatgttattagaacatgtccgacacccctaccgctgccatttgggccctttaataaagccaagtagagaaatctggcaataaaaggcaaatgtaagcatgctttctttaagacgcatcataaatggttttctttaagtgaatggaagagtttgacagagatacacctttgtaagaaaacattaagaatgctggctggctgtggtggctcacacctgtattcccagcactttgggaggcctaggcaggaggattgcttgagcctgggacttcgagaccagactgggaaacatggcaaaatcccatctctacaacaaaaatacaaaaattagccaagtgcggtggtgtgcctgtagtcctagttacttgggaggctgaggtgggagaatcacctgagcccaggaggtggaggctgcagtgagccatgccaatgcactccagtctgggcaacagagtgagaccctgtctcaaaaataaataaataaataaatgaataaagagaatgctaatcatttctgggttcactgcgactcactgtagtgctggggatcccccttgtaacactggaactgaaaggcagtgatgaaagctatgtcaagcattcattattctgaagaggaggagaaatgccacatacctttcccatgggacctgtggtggaatgaatccatacttctgcctcacttcgagcagacttttgttctcggcgctcctcacgatggagtttcatgcttcattttcacatctctctgcacaattagattgggagctccttgagggcagagtacgtgccttaatctttatctttgtaatgccacaatgaacagagtgcctcctggtacactgtaggagcttaagaaatactcactgaatgcatgaatgaatgaatgaacaaatgaaggaatgactaaggatgtttgtagtgctataatatagaatgggatttactctgctttaccagttagtttcataataaacaaatagtctgt

SEQ ID NO: 21 - DNA, 3178 bp, Homo sapien
ggcaccgattcggggcctgcccggacttcgccgcacgctgcagaacctcgcccagcgcccaccatgccccggcagctcagcgcggcggccgcgctcttcgcgtccctggccgtaattttgcacgatggcagtcaaatgagagcaaaagcatttccagaaaccagagattattctcaacctactgcagcagcaacagtacaggacataaaaaaacctgtccagcaaccagctaagcaagcacctcaccaaactttagcagcaagattcatggatggtcatatcacctttcaaacagcggccacagtaaaaattccaacaactaccccagcaactacaaaaaacactgcaaccaccagcccaattacctacaccctggtcacaacccaggccacacccaacaactcacacacagctcctccagttactgaagttacagtcggccctagcttagccccttattcactgccacccaccatcaccccaccagctcatacagctggaaccagttcatcaaccgtcagccacacaactgggaacaccactcaacccagtaaccagaccacccttccagcaactttatcgatagcactgcacaaaagcacaaccggtcagaagcctgatcaacccacccatgccccaggaacaacggcagctgcccacaataccacccgcacagctgcacctgcctccacggttcctgggcccacccttgcacctcagccatcgtcagtcaagactggaatttatcaggttctaaacggaagcagactctgtataaaagcagagatggggatacagctgattgttcaagacaaggagtcggttttttcacctcggagatacttcaacatcgaccccaacgcaacgcaagcctctgggaactgtggcacccgaaaatccaaccttctgttgaattttcagggcggatttgtgaatctcacatttaccaaggatgaagaatcatattatatcagtgaagtgggagcctatttgaccgtctcagatccagagacagtttaccaaggaatcaaacatgcggtggtgatgttccagacagcagtcgggcattccttcaagtgcgtgagtgaacagagcctccagttgtcagcccacctgcaggtgaaaacaaccgatgtccaacttcaagcctttgattttgaagatgaccactttggaaatgtggatgagtgctcgtctgactacacaattgtgcttcctgtgattggggccatcgtggttggtctctgccttatgggtatgggtgtctataaaatccgcctaaggtgtcaatcatctggataccagagaatctaattgttgcccggggggaatgaaaataatggaatttagagaactctttcatcccttccaggatggatgttgggaaattccctcagagtgtgggtccttcaaacaatgtaaaccaccatcttctattcaaatgaagtgagtcatgtgtgatttaagttcaggcagcacatcaatttctaaatactttttgtttattttatgaaagatatagtgagctgtttattttctagtttcctttagaatattttagccactcaaagtcaacatttgagatatgttgaattaacataatatatgtaaagtagaataagccttcaaattataaaccaagggtcaattgtaactaatactactgtgtgtgcattgaagattttattttacccttgatcttaacaaagcctttgctttgttatcaaatggactttcagtgcttttactatctgtgttttatggtttcatgtaacatacatattcctggtgtagcacttaactccttttccactttaaatttgtttttgttttttgagacggagtttcactcttgtcacccaggctggagtacagtggcacgatctcggcttatggcaacctccgcctcccgggttcaagtgattctcctgcttcagcttcccgagtagctgggattacaggcacacactaccacgcctggctaatttttgtatttttattatagacgggtttcaccatgttggccagactggtcttgaactcttgacctcaggtgatccacccacctcagcctcccaaagtgctgggattacaggcatgagccattgcgcccggccttaaatgttttttttaatcatcaaaaagaacaacatatctcaggttgtctaagtgtttttatgtaaaaccaacaaaaagaacaaatcagcttatattttttatcttgatgactcctgctccagaattgctagactaagaattaggtggctacagatggtagaactaaacaataagcaagagacaataataatggcccttaattattaacaaagtgccagagtctaggctaagcactttatctatatctcatttcattctcacaacttataagtgaatgagtaaactgagacttaagggaactgaatcacttaaatgtcacctggctaactgatggcagagccagagcttgaattcatgttggtctgacatcaaggtctttggtcttctccctacaccaagttacctacaagaacaatgacaccacactctgcctgaaggctcacacctcataccagcatacgctcaccttacagggaaatgggtttatccaggatcatgagacattagggtagatgaaaggagagctttgcagataacaaaatagcctatccttaataaatcctccactctctggaaggagactgaggggctttgtaaaacattagtcagttgctcatttttatgggattgcttagctgggctgtaaagatgaaggcatcaaataaactcaaagtatttttaaatttttttgataatagagaaacttcgctaaccaactgttctttcttgagtgtatagccccatcttgtggtaacttgctgcttctgcacttcatatccatatttcctattgttcactttattctgtagagcagcctgccaagaattttatttctgctgttttttttgctgctaaagaaaggaactaagtcaggatgttaacagaaaagtccacataaccctagaattcttagtcaaggaataattcaagtcagcctagagaccatgttgactttcctcatgtgtttccttatgactcagtaagttggcaaggtcctgactttagtcttaataaaacattgaattgtagtaaaggtttttgcaataaaaacttactttgg

SEQ ID NO: 22 - DNA, 1741 bp, Homo sapien
cagaggtagcctgaaagaagcaggaactccaggatcccaaaccagagcagaccctatagtaaagtatttttacatcttttcctttccccagaagagatccctaacctattgttttattgacagccttgctgttagaggctctttcccagaagttggacgaagaggctcaggcgttgctgtttcttgtcttccaagtcaagtggttactctggtaatggattgcctctctccgagctttcaccctggtgagactgtccagatctagtctgtaaacccagcttagaagcactgttgtaaaaatgactgaagagcccatcaaggagatcctgggagccccaaaggctcacatggcagcgacgatggagaagagccccaagagtgaagttgtgatcaccacagtccctctggtcagtgagattcagttgatggctgctacagggggtaccgagctctcctgctaccgctgcatcatcccctttgctgtggttgtcttcatcgccggcatcgtggtcaccgcggtggcttacagcttcaattcccatgggtctattatctccatctttggcctggttgttctgtcatctggactttttttactagcctccagtgccttgtgctggaaagtgagacaaaggagcaagaaagccaagagacgggagagtcaaacagctctcgtggcaaatcagagaagcttgtttgcttgagactgaatacgaccaaatgggccattgggcctggaaaacgtgctctgactttgtcacccaattcacccagaaccatggtgggagagaacagacttggcgttggagcagactggaagaatgggggtgggagggtggaggggcttctcctttgtgaggaatgactcatgtcttctttaacgacaaacttaaccctaagggctacttctgagactgaaaaatcagctttctatttacatgaaacactttgggggtcatgggagtgcacagcattagacagtatttggttcaccctgtaaagtagccaagaaaagatgagaaaaatcaagataggcctggcacactagacatttgcctccaaaagaaataacctacagtcttaagatgtatcataaaaatgttctgccaaggatctaaattaccttgggtttcgcatatgtctatgaaattctgtgataatttttttcaatacattgattcactggcgtctgttttcattttatacttttaataactcatcactggtggtactttatcttgaaaagtaatattttttatattttaacattggacagtgttagccagttgtaatgatgtatcagaagtaaagaaaaacccattaaagttatagctaatagatgctgttgggggttaaattaatagtaaaataatccaatatagcacttttgatgatttttatataaaagtcaactgtacatttcattcagaataataaatacttattgctgctaaaacttcttaaatggttgtttctgctatagttatttctattgcagttccaaattgccatcttcccttgtctcatttgcaagttctcaattgtatttctctcaaatggacaggttccttctttactggaggatttttgtttttatcatattggtttttcattacttctgaatagtcttaattacgtttactaaattctaaaggatttctgtgctattataattaggaaatcaacgtctttggtcaggaactttataatgtgctattaaatgtatattacatttttgtgg

SEQ ID NO: 23 - DNA, 1395 bp, Homo sapien
atgctgtcactgctccacgcatcaacgctggcagtccttggggctctgtgtgtatatggtgcaggtcacctagagcaacctcaaatttccagtactaaaacgctgtcaaaaacagcccgcctggaatgtgtggtgtctggaataacaatttctgcaacatctgtatattggtatcgagagagacctggtgaagtcatacagttcctggtgtccatttcatatgacggcactgtcagaaaggaatccggcattccgtcaggcaaatttgaggtggataggatacctgaaacgtctacatccactctcaccattcacaatgtagagaaacaggacatagctacctactactgtgccttgtgggaggtgcggctagccaaccaagagttgggcaaaaaaatcaaggtatttggtcccggaacaaagcttatcattacagataaacaacttgatgcagatgtttcccccaagcccactatttttcttccttcaattgctgaaacaaagctccagaaggctggaacatacctttgtcttcttgagaaatttttccctgatgttattaagatacattggcaagaaaagaagagcaacacgattctgggatcccaggaggggaacaccatgaagactaacgacacatacatgaaatttagctggttaacggtgccagaaaagtcactggacaaagaacacagatgtatcgtcagacatgagaataataaaaacggagttgatcaagaaattatctttcctccaataaagacagatgtcatcacaatggatcccaaagacaattgttcaaaagatgcaaatgatacactactgctgcagctcacaaacacctctgcatattacacgtacctcctcctgctcctcaagagtgtggtctattttgccatcatcacctgctgtctgcttagaagaacggctttctgctgcaatggagagaaatcataacagacggtggcacaaggaggccatcttttcctcatcggttattgtccctagaagcgtcttctgaggatctagttgggctttctttctgggtttgggccatttcagttctcatgtgtgtactattctatcattattgtataacggttttcaaaccagtgggcacacagagaacctcactctgtaataacaatgaggaatagccacggcgatctccagcaccaatctctccatgttttccacagctcctccagccaacccaaatagcgcctgctatagtgtagacatcctgcggcttctagccttgtccctctcttagtgttctttaatcagataactgcctggaagcctttcattttacacgccctgaagcagtcttctttgctagttgaattatgtggtgtgtttttccgtaataagcaaaataaatttaaaaaaatg

SEQ ID NO: 24 - DNA, 3282 bp, Homo sapien
gggacagggctgaggatgaggagaaccctggggacccagaagaccgtgccttgcccggaagtcctgcctgtaggcctgaaggacttgccctaacagagcctcaacaactacctggtgattcctacttcagccccttggtgtgagcagcttctcaacatgaactacagcctccacttggccttcgtgtgtctgagtctcttcactgagaggatgtgcatccaggggagtcagttcaacgtcgaggtcggcagaagtgacaagctttccctgcctggctttgagaacctcacagcaggatataacaaatttctcaggcccaattttggtggagaacccgtacagatagcgctgactctggacattgcaagtatctctagcatttcagagagtaacatggactacacagccaccatatacctccgacagcgctggatggaccagcggctggtgtttgaaggcaacaagagcttcactctggatgcccgcctcgtggagttcctctgggtgccagatacttacattgtggagtccaagaagtccttcctccatgaagtcactgtgggaaacaggctcatccgcctcttctccaatggcacggtcctgtatgccctcagaatcacgacaactgttgcatgtaacatggatctgtctaaataccccatggacacacagacatgcaagttgcagctggaaagctggggctatgatggaaatgatgtggagttcacctggctgagagggaacgactctgtgcgtggactggaacacctgcggcttgctcagtacaccatagagcggtatttcaccttagtcaccagatcgcagcaggagacaggaaattacactagattggtcttacagtttgagcttcggaggaatgttctgtatttcattttggaaacctacgttccttccactttcctggtggtgttgtcctgggtttcattttggatctctctcgattcagtccctgcaagaacctgcattggagtgacgaccgtgttatcaatgaccacactgatgatcgggtcccgcacttctcttcccaacaccaactgcttcatcaaggccatcgatgtgtacctggggatctgctttagctttgtgtttggggccttgctagaatatgcagttgctcactacagttccttacagcagatggcagccaaagatagggggacaacaaaggaagtagaagaagtcagtattactaatatcatcaacagctccatctccagctttaaacggaagatcagctttgccagcattgaaatttccagcgacaacgttgactacagtgacttgacaatgaaaaccagcgacaagttcaagtttgtcttccgagaaaagatgggcaggattgttgattatttcacaattcaaaaccccagtaatgttgatcactattccaaactactgtttcctttgatttttatgctagccaatgtattttactgggcatactacatgtatttttgagtcaatgttaaatttcttgcatgccataggtcttcaacaggacaagataatgatgtaaatggtattttaggccaagtgtgcacccacatccaatggtgctacaagtgactgaaataatatttgagtctttctgctcaaagaatgaagctccaaccattgttctaagctgtgtagaagtcctagcattataggatcttgtaatagaaacatcagtccattcctctttcatcttaatcaaggacattcccatggagcccaagattacaaatgtactcagggctgtttattcggtggctccctggtttgcatttacctcatataaagaatgggaaggagaccattgggtaaccctcaagtgtcagaagttgtttctaaagtaactatacatgttttttactaaatctctgcagtgcttataaaatacattgttgcctatttagggagtaacattttctagtttttgtttctggttaaaatgaaatatgggcttatgtcaattcattggaagtcaatgcactaactcaataccaagatgagtttttaaataatgaatattatttaataccacaacagaattatccccaatttccaataagtcctatcattgaaaattcaaatataagtgaagaaaaaattagtagatcaacaatctaaacaaatccctcggttctaagatacaatggattccccatactggaaggactctgaggctttattcccccactatgcatatcttatcattttattattatacacacatccatcctaaactatactaaagcccttttcccatgcatggatggaaatggaagatttttttgtaacttgttctagaagtcttaatatgggctgttgccatgaaggcttgcagaattgagtccattttctagctgcctttattcacatagtgatggggtactaaaagtactgggttgactcagagagtcgctgtcattctgtcattgctgctactctaacactgagcaacactctcccagtggcagatcccctgtatcattccaagaggagcattcatccctttgctctaatgatcaggaatgatgcttattagaaaacaaactgcttgacccaggaacaagtggcttagcttaagtaaacttggctttgctcagatccctgatccttccagctggtctgctctgagtggcttatcccgcatgagcaggagcgtgctggccctgagtactgaactttctgagtaacaatgagacacgttacagaacctatgttcaggttgcgggtgagctgccctctccaaatccagccagagatgcacattcctcggccagtctcagccaacagtaccaaaagtgatttttgagtgtgccagggtaaaggcttccagttcagcctcagttattttagacaatctcgccatctttaatttcttagcttcctgttctaataaatgcacggctttacctttcctgtcagaaataaaccaaggctctaaaagatgatttcccttctgtaactccctagagccacaggttctcattccttttcccattatacttctcacaattcagtttctatgagtttgatcacctgatttttttaacaaaatatttctaacgggaatgggtgggagtgctggtgaaaagagatgaaatgtggttgtatgagccaatcatatttgtgattttttaaaaaaagtttaaaaggaaatatctgttctgaaaccccacttaagcattgtttttatataaaaacaatgataaagatgtgaactgtgaaataaatataccatattagctacccaccaaaaaaaaaaaaaaaaaa

SEQ ID NO: 25 - DNA, 4675 bp, Homo sapien
tgctgtcagggcgctcaagctgccggggaagaagagcccagacctaggggagtatgatccacttacccaggctgacagtgatgagagcgaagacgatctggtgcttaacctgcagaagaatggaggggtcaaaaatgggaagagtcctttgggagaagcgccagaacccgactcagatgctgaggttgcagaggctgcaaagccacatctttcagaagtcaccacggagggctacccctcagaaccccttgggggcctggaacagaaggcggcctcctccctggtgtcatatgtgcgcacgtctgtcttcctgctgactttggggatctcgatgatcctggtgctcctgtgtgctttcctgatcccctgtcctcccagagatctgcacagcacctggagccgccacttgggctcccagggaggtggggacctgtctccattggaattggctgatgtgaatggagatggcctgcgtgatgtgcttctctcctttgtgatgtcaaggaacgggagtgcagtaggtgtctcaagaccagctgctaatcttgtgtgcctttcggggatgaatggcagcacactgtggtctagtcttctccctgaggaggctcgagatatcacatgtttggagctgatgccaggaagcttggctgaaaccatctgccttgtgacagggacacacaagatgctcagcgcattcaatgcaacgtcagggaaagccatttggactttaaacccaaactacttgtccaacggtaccttggctgccccagttgtggtactgccagacttggatgaagacggtgttcgagaccttgtggttctggccattggggaattgcagccagatctgtgctttctgctggtgtctggccggaccggaaatccagtgggtcgacctgtgaagtacaacatcgttggagttgggaatctgattggtcctcaggtttacatcaccacaaatggggctgtctacatcctgtttggctttggaaatatacaagctgtcgcactgcgggacatttttgttcaggcccaaaatcgagacagctcaccaccttctctgcagatagaagagccagaatgggaaaagcgaagatccatcaacctgtctgagctcattgatgtttacagtgatggtgttgaactactccagatggtgaaggcaccagattccaactgcagcaaccttctgattacaaccagacaaagccttgtgctgcttcgggggcaaaatctgacaccttactgggcattgagacttcaaggcctgcgcagccagcctactcctggatatttcactgatgatcagacattagatttccttctgcagatacaggatggagttgggatgaaaaagatgatggttgtggatggtgactctggctccattgtttggagttaccgtgctccgtgtcacatgaaagaaacgccagccacctcagcagttacttcagaccagaagtctgtcttcctcttctgggccgaagggctgtcagctgcatctcccaattccgatatcatcctaggaactgagccgcccagccttcaccacctttacctcctgcatcctgcgttcccctccatccttctggatctggccaacaccaccggcacagtgacggcttcagaggttggaattaacgacctctggaaagatgccttttatgttaccaggacaacagggccaagctccgaaggccatccagcagccctggtggtcagcaagcttagtctacggtgggcactaatggagggccagatggctcagctacaggagtccacccccaaaattggccgtggggagctgcgaagatttctctctaggataaagtttgttgaagctccctacgagatctaatctgatggaatcttcagttgcagaagaagtgaacagagtggataccctctctactctcctgtcactgtaaaatcagttctatggagagaagacttcttcgtcctcatttaccacctccctgatggttgcaaaggcttgggaaggcatgttggagtctttgacggcagcatgatctatttggctggggcatcttacctaccttttcagtccctgcattaatcccctctaggaactctgcgtggatcgtttggaaatgtgaatctcttaagtatttaatttttttggtatgtctaatttatgaagtcttgctgggaaagccagtgaagtctatgactaggaaacattttgttgtacattgtgctgtgtgtgtgtatattttagtgttgtggtgaagttattttccaggtatgtcctaagcttcagggatccagtttcttgtccttctgaaatatatctggtttgtttggtcattttgagacttccagatgccctacctctgatgttgagggccacttatttctctccttattctttcccacctgtaccttggctacttccaaattgtagacagaatgagaaagatttatagtggaagactgagttagccatccaagcattttcatctctcttgttttatatcctatttccttagattttccatccatgtctattaagtgaccacaagaataactatattcctatcacaaggggagcaagaggatgtagtctcagtgacccatctctgaccaagtccacatgttgtgttatatgtggctctgatggttctgccagtcatgatcttttttctgtggcgacatcagaagtgtatgtttgcatgctgtcttcaacttagaggagaactggaagtcaggagcctttgatgtccttatcctgctgtatgtcttctctgcatctttttctatagggcaccctccttagctcccctcactctgttttctcttctattcagggatatgtttctggactttttcttctgctacttgagtccaggatgcaaccattttgtcctgcatctcttctttcctgtagagcctttgaagcattgtattttgggaaaattcttctgtaaatactataacttttataaatggttaagttatttagaattatctccagtgcttacttctcccttcttctgtataaatctgctacttcaattaagttctcctctaaacttttaggtcattgtttatatagcagaaaattcaatgttagcggatggaaaactgcttcttgaataaccttgataggtcatccctgagtgcacctcaggttctctctttacctgggcttgtatcttttttttttttttttttttttttttgagacagagttttgctcttgtcgcccaggctggagtgcagtggcacaatctcggctcactgcaaccttcgcctcctgggttcaagcgattctccagccttagcctcccaagtagctgggactacaggtgcccgctaccatgcctggctaatttttttttttgtatttttagtagagacggggtttcaccatgttggccaggctggtcacgaactcctgacctcagataatccacctgcttctgcctcccaaagtgctgggattacaggcgtgagccaccatgcccggctgggcttgtatcttttagcttgtgttagtaaaaggattctagaaaattatgaagtccagattcaaagggatctctgttaattacccactgacaggcattatgacctaacaggaggttggtagcagtagatccaagcatgcatgttgcctggcctgtagattggccttatcaggtttctgggtgcctctgccttaagatcctgaaggcaaattttgtttcaacagtttggaagtcatctgtgggtccagcttgactttggaggaataagaagatacttctagagtatgggaatgattccagataatttctgggatttgaatctacttgagtttaagggcctgggacctaatttggtttagtatagaatttgaagaattaatttataggcagctgaatacccaaaacttgggtggtggtcctgtggtttggctgagctgtccgggcataacctggttctctgttatgttaaggctttctgggaagccagccactctgcgcaggagtgaaacatgaagttgttttctgaggacctgttttggtgggattgtttgggcagaggactgtgtttatgcagggcaaatcccagaaagataagaggaagctagagaaacttaatgtacctgaattcttcatggtgtatttgcaaactaacttaacatagattcttttgactatggtaagtttgaatctctccttgccaaacaacattataagtttagttttcttcttcctcttgcagccggtacagaaaggtgtaagtggtggctgaaaattgaggaagcttcatctgaccaatgtgggtgctggtttcttgtgaaatgtgtccctaagcctccttctccttgcaggcagccacccacccaggtgtctaagataggacatgctcctttctttctctaatcccatcctgaggttgccggcaaagccaatatgaccactactgagaaatagtaatgacttctacaaatgcaagggtcttaccctcctctttcccttaaacaccctcccttttccttagaccccgtttttgccatcccccaaatgtgtggtatggtgaaactaatcccctgaatgtgaattgctatccttattgccctattaaagaagagccagctggtatattgtcaggaagcactatttaaaatgtgaactgttatagagtaaataaataaatactctacagg

SEQ ID NO: 26 - DNA, 3515 bp, Homo sapien
cgcttagaactgtgttgagctctcacccatcacgatgagcaacaaattcctgggcacctggaaacttgtctctagcgagaactttgacgattacatgaaagctctgggtgtggggttagccaccagaaaactgggaaatttggccaaacccactgtgatcatcagcaagaaaggagatattataactatacgaactgaaagtacctttaaaaatacagaaatctccttcaagctaggccaggaatttgaagaaaccacagctgacaatagaaagaccaagagcatcgtaaccctgcagagaggatcactgaatcaagtgcagagatgggatggcaaagagacaaccataaagagaaagctagtgaatgggaaaatggtagcggaatgtaaaatgaagggcgtggtgtgcaccagaatctatgagaaggtctgaaaaatcatttcttcattgaagtggctttttatcatttaatgatggaaatcaattgcttccattgacaaaactgaatacactgcaaatatttgtttttgcttttgtcttaatatatcagatatgcaaaggcctaaactgagaattaatctaaaagtcagtgttatttaaacattttcaatgtgcatgcatgtcattattacatcaaagcatatatattggccagacacaaacagttgatgatgtcattcaattaactacaaaattctaatctatgttgaactttgtatacttgaaatgataataaaaaggatataatttcttagtaaaatgaaatcaaagtattgatcagggtagcaaactcaaatgctgacaggggccagaggagatatggggaaggagcatcagaaatgaggcaagctaggagaatgggctattataatgtaaagaattgtagtctcagttaaaaggggtagcctctactccagccaacattttaaaattaatggataatttatagacagttaaatttatagacagttaagtaaaaatggataatttatagacagataatttatagacaggtaaatgtgagttaaatataactcacatcccactcaagacacaaaacattttcttaatcctagtacatttttttctgtcccttcccaatcagtgtccttttctgttccacccctaccaaaagcaagtagtggtttggtttctatcatatagattaattttacctgctcatatgaagggaattgtacatcatgcattcttttctgtttgccttttttaaattcagcatcatgtttttgtgatacatccacattgttgcatgcagctgtagtttgtttctttttattaccaagtactatttcattgtatgaatatatcacagtttatccattctactattaagacaattgagctatttctaattttcggctgctatgaataaagctgctacaaatatttttgtacaagactttttgtaaacataggagtccctttattttaaataaataactagtcatatcattaggtccagtaattgttgacaggcaggaacgggggaccattgcattgtgcccaagtaataataaaactatttcagatgtattatatgattgagcaaatgagaaaacatgttgatgttgatgggagtcaggatgttcactatggaaaaacaaatatacaaatatgaaatgagggaaggcaagaaagaaccatgtggaaatggaatagaattggtataaattcataatttctaaaccatgtatatgtacgtttatatgtattataattgcatacacatgcctccatgcatatatgtgtgtgataatacacatgcatttatgtgcgtgtgtgtatacacatgcatatatttactaatcctatctgccaaaatggcttagacacaaaaacacctcagcagaaatgaatatacctagcactcagatcttcgtgtctaatatagtttgccactaaaaggaaccaaggctacttggaaaaatggatgattccaaagcaagggcaaggtaggaacaagatgagcttgaaatatcttgttatgccagaaagtaatgttaaaaaaaaaaaatagaggtatattgccaaaacatagagccagcttgaaggggctcccactggccaaacttgagccaatctgagagcaaaataattgagaaaaataaataacaagataattgaaaaaaaataaaataaattcccaattccattgggaaaaaatagaaatccatgaatccatactgatataatgatagataatcgatagataggtagatgactgacagatgatagatagatatatagatagatagatagatagatagatagatagatagatagatagagaaatgagaaggtttctcttttgcaatagaacgtcatggaccagtgttaaatgtgagtggaaggagttctggaattggaaaaccatcatttttcaaccatcacagtaaatatggctcaggcaagaattatcaatcaatgctaaagctagggggaaatttcgcttaggagcaggatattagggtattagtctgggcttaaagtatctcctcacagattgttgttagtttctggggaaagaatagtaaccatgcaatggaaaaaaatggacaacctcttgactaggttatcaaaattaacctcaccaataaagggtggatgttcaacatgtgccttcaaatgtgacccactgagaaggaaacaacatcactgtaacaacaacaaccagaaacgacagggggttttgactgaattcttcaaaaatgtcaatgtcatagaagacaaagaaaggttgtggaaatgtttcagattaaatgatagtaaaaacacctgacaactaaacatagtaagtaatactagactggattctgtaccagaggtaacataagtgctccaaaggacaatgttaggtcaactggcaaattggaatatagacagtcaatcagataagaagtatactttgattaagtaaaaaaaatccctattcttggaaaatacacaataaagtattttgaggtaaagggccataatgtatgcaatctactctcaaaaaattcagaaacatatatttgtgtgcatttgcatgtgcaacagtacacacaaacatacataaagagagcaattgataaggcaaataaggtaacatttaacaataatctgatacacataaatagagaaagagcaattgataaagtaaatgaggtaaaatttaacaataatctgagcaaaaggtatatgtgttttctttgagacagtctgattcttgcaacttattctgtaagttggaacttatttccaaacatgattgaaaaaaaaccccgcacttggcaacttcttctctttttcagcctagaaatgtctgtgttaagtggttttttatttattgttgttgtttgttgttattgttgttttgttgccaggctccaactcacaaaatacgagtttaaaaactgcgttgttatttttagagatttgtgataatacaacttgttataaaatttattcctcaataaatataatttctctactatgcaaaaaaaaaaaaaaa

SEQ ID NO: 27 - DNA, 1879 bp, Homo sapien
cagccccgcgcgccggccgagtcgctgagccgcggctgccggacgggacgggaccggctaggctgggcgcgccccccgggccccgccgtgggcatgggcgcactggcccgggcgctgctgctgcctctgctggcccagtggctcctgcgcgccgccccggagctggcccccgcgcccttcacgctgcccctccgggtggccgcggccacgaaccgcgtagttgcgcccaccccgggacccgggacccctgccgagcgccacgccgacggcttggcgctcgccctggagcctgccctggcgtcccccgcgggcgccgccaacttcttggccatggtagacaacctgcagggggactctggccgcggctactacctggagatgctgatcgggacccccccgcagaagctacagattctcgttgacactggaagcagtaactttgccgtggcaggaaccccgcactcctacatagacacgtactttgacacagagaggtctagcacataccgctccaagggctttgacgtcacagtgaagtacacacaaggaagctggacgggcttcgttggggaagacctcgtcaccatccccaaaggcttcaatacttcttttcttgtcaacattgccactatttttgaatcagagaatttctttttgcctgggattaaatggaatggaatacttggcctagcttatgccacacttgccaagccatcaagttctctggagaccttcttcgactccctggtgacacaagcaaacatccccaacgttttctccatgcagatgtgtggagccggcttgcccgttgctggatctgggaccaacggaggtagtcttgtcttgggtggaattgaaccaagtttgtataaaggagacatctggtatacccctattaaggaagagtggtactaccagatagaaattctgaaattggaaattggaggccaaagccttaatctggactgcagagagtataacgcagacaaggccatcgtggacagtggcaccacgctgctgcgcctgccccagaaggtgtttgatgcggtggtggaagctgtggcccgcgcatctctgattccagaattctctgatggtttctggactgggtcccagctggcgtgctggacgaattcggaaacaccttggtcttacttccctaaaatctccatctacctgagagacgagaactccagcaggtcattccgtatcacaatcctgcctcagctttacattcagcccatgatgggggccggcctgaattatgaatgttaccgattcggcatttccccatccacaaatgcgctggtgatcggtgccacggtgatggagggcttctacgtcatcttcgacagagcccagaagagggtgggcttcgcagcgagcccctgtgcagaaattgcaggtgctgcagtgtctgaaatttccgggcctttctcaacagaggatgtagccagcaactgtgtccccgctcagtctttgagcgagcccattttgtggattgtgtcctatgcgctcatgagcgtctgtggagccatcctccttgtcttaatcgtcctgctgctgctgccgttccggtgtcagcgtcgcccccgtgaccctgaggtcgtcaatgatgagtcctctctggtcagacatcgctggaaatgaatagccaggcctgacctcaagcaaccatgaactcagctattaagaaaatcacatttccagggcagcagccgggatcgatggtggcgctttctcctgtgcccacccgtcttcaatctctgttctgctcccagatgccttctagattcactgtcttttgattcttgattttcaagctttcaaatcctccctacttccaagaaaaataattaaaaaaaaaacttcattctaa

SEQ ID NO: 28 - DNA, 1579 bp, Homo sapien
gagagaatagctacagattctccatcctcagtctttgcaaggcgacagctgtgccagccgggctctggcaggctcctggcagcatggcagtgaagcttgggaccctcctgctggcccttgccctgggcctggcccagccagcctctgcccgccggaagctgctggtgtttctgctggatggttttcgctcagactacatcagtgatgaggcgctggagtcattgcctggtttcaaagagattgtgagcaggggagtaaaagtggattacttgactccagacttccctagtctctcgtatcccaattattataccctaatgactggccgccattgtgaagtccatcagatgatcgggaactacatgtgggaccccaccaccaacaagtcctttgacattggcgtcaacaaagacagcctaatgcctctctggtggaatggatcagaacctctgtgggtcactctgaccaaggccaaaaggaaggtctacatgtactactggccaggctgtgaggttgagattctgggtgtcagacccacctactgcctagaatataaaaatgtcccaacggatatcaattttgccaatgcagtcagcgatgctcttgactccttcaagagtggccgggccgacctggcagccatataccatgagcgcattgacgtggaaggccaccactacgggcctgcatctccgcagaggaaagatgccctcaaggctgtagacactgtcctgaagtacatgaccaagtggatccaggagcggggcctgcaggaccgcctgaacgtcattattttctcggatcacggaatgaccgacattttctggatggacaaagtgattgagctgaataagtacatcagcctgaatgacctgcagcaagtgaaggaccgcgggcctgttgtgagcctttggccggcccctgggaaacactctgagatatataacaaactgagcacagtggaacacatgactgtctacgagaaagaagccatcccaagcaggttctattacaagaaaggaaagtttgtctctcctttgactttagtggctgatgaaggctggttcataactgagaatcgagagatgcttccgttttggatgaacagcaccggcaggcgggaaggttggcagcgtggatggcacggctacgacaacgagctcatggacatgcggggcatcttcctggccttcggacctgatttcaaatccaacttcagagctgctcctatcaggtcggtggacgtctacaatgtcatgtgcaatgtggtgggcatcaccccgctgcccaacaacggatcctggtccagggtgatgtgcatgctgaagggccgcgccggcactgccccgcctgtctggcccagccactgtgccctggcactgattcttctcttcctgcttgcataactgatcatattgcttgtctcagaaaaaaacaccatcagcaaagtgggcctccaaagccagatgattttcattttatgtgtgaataatagcttcattaacacaatcaagaccatgcacattgtaaatacattattcttggataattctatacataaaagttcctacttgttaaa

SEQ ID NO: 29 - DNA, 471 bp, Homo sapien
gcatttttgtctgtgctccctgatcttcaggtcaccaccatgaagttcttagcagtcctggtactcttgggagtttccatctttctggtctctgcccagaatccgacaacagctgctccagctgacacgtatccagctactggtcctgctgatgatgaagcccctgatgctgaaaccactgctgctgcaaccactgcgaccactgctgctcctaccactgcaaccaccgctgcttctaccactgctcgtaaagacattccagttttacccaaatgggttggggatctcccgaatggtagagtgtgtccctgagatggaatcagcttgagtcttctgcaattggtcacaactattcatgcttcctgtgatttcatccaactacttaccttgcctacgatatcccctttatctctaatcagtttattttctttcaaataaaaaataactatgagcaacataaaaaaaaaaaaa

SEQ ID NO: 30 - DNA, 1021 bp, Homo sapien
gactacggggagagagaggagaccaggacagctgctgagacctctaagaagtccagatactaagagcaaagatgtttcaaactgggggcctcattgtcttctacgggctgttagcccagaccatggcccagtttggaggcctgcccgtgcccctggaccagaccctgcccttgaatgtgaatccagccctgcccttgagtcccacaggtcttgcaggaagcttgacaaatgccctcagcaatggcctgctgtctgggggcctgttgggcattctggaaaaccttccgctcctggacatcctgaagcctggaggaggtacttctggtggcctccttgggggactgcttggaaaagtgacgtcagtgattcctggcctgaacaacatcattgacataaaggtcactgacccccagctgctggaacttggccttgtgcagagccctgatggccaccgtctctatgtcaccatccctctcggcataaagctccaagtgaatacgcccctggtcggtgcaagtctgttgaggctggctgtgaagctggacatcactgcagaaatcttagctgtgagagataagcaggagaggatccacctggtccttggtgactgcacccattcccctggaagcctgcaaatttctctgcttgatggacttggccccctccccattcaaggtcttctggacagcctcacagggatcttgaataaagtcctgcctgagttggttcagggcaacgtgtgccctctggtcaatgaggttctcagaggcttggacatcaccctggtgcatgacattgttaacatgctgatccacggactacagtttgtcatcaaggtctaagccttccaggaaggggctggcctctgctgagctgcttcccagtgctcacagatggctggcccatgtgctggaagatgacacagttgccttctctccgaggaacctgccccctctcctttcccaccaggcgtgtgtaacatcccatgtgcctcacctaataaaatggctcttcttatgca

SEQ ID NO: 31 - DNA, 2868 bp, Homo sapien
gggcgctgggagacaccggacgcccgctcggctgcgctgcggctcaggcccccgctcgggcccgacccgctcggtcaccgccggctcgggcgcgcacctgccggctgcggccccagggccatgcggaggcccacgaggaggccggcggccacgcgcatcccgtagcccaggtggcccaggtctgcaccgcggcggcctcggcgccatggagcccccgtattcgctgacggcgcactacgatgagttccaagaggtcaagtacgtgagccgctgcggcgcggggggcgcgcgcggggcctccctgcccccgggcttcccgttgggcgctgcgcgcagcgtcaccggggcccggtccgggctgccgcgctggaaccggcgcgaggtgtgcctgctgtcggggctggtgttcgccgccggcctctgcgccattctggcggctatgctggccctcaagtacctgggcccggtcgcggccggcggcggcgcctgtcccgagggctgccctgagcgcaaggccttcgcgcgcgccgctcgcttcctggccgccaacctggacgccagcatcgacccatgccaggacttctactcgttcgcctgcggcggttggctgcggcgccacgccatccccgacgacaagctcacctatggcaccatcgcggccatcggcgagcaaaacgaggagcgcctacggcgcctgctggcgcggcccgggggtgggcctggcggcgcggcccagcgcaaggtgcgcgccttcttccgctcgtgcctcgacatgcgcgagatcgagcgactgggcccgcgacccatgctagaggtcatcgaggactgcgggggctgggacctgggcggcgcggaggagcgtccgggggtcgcggcgcgatgggacctcaaccggctgctgtacaaggcgcagggcgtgtacagcgccgccgcgctcttctcgctcacggtcagcctggacgacaggaactcctcgcgctacgtcatccgcattgaccaggatgggctcaccctgccagagaggaccctgtacctcgctcaggatgaggacagtgagaagatcctggcagcatacagggtgttcatggagcgagtgctcagcctcctgggtgcagacgctgtggaacagaaggcccaagagatcctgcaagtggagcagcagctggccaacatcactgtgtcagagtatgacgacctacggcgagatgtcagctccatgtacaacaaggtgacgctggggcagctgcagaagatcaccccccacttgcggtggaagtggctgctagaccagatcttccaggaggacttctcagaggaagaggaggtggtgctgctggcgacagactacatgcagcaggtgtcgcagctcatccgctccacaccccaccgggtcctgcacaactacctggtgtggcgcgtggtggtggtcctgagtgaacacctgtccccgccattccgtgaggcactgcacgagctggcacaggagatggagggcagcgacaagccacaggagctggcccgggtctgcttgggccaggccaatcgccactttggcatggcgcttggcgccctctttgtacatgagcacttctcagccgccagcaaagccaaggtgcagcagctagtggaagacatcaagtacatcctgggccagcgcctggaggagctggactggatggacgccgagaccagggctgctgctcgggccaagctccagtacatgatggtgatggtcggctacccggacttcctgctgaaacccgatgctgtggacaaggagtatgagtttgaggtccatgagaagacctacttcaagaacatcttgaacagcatccccttcagcatccagctctcagttaagaagattcggcaggaggtggacaagtccacgtggctgctccccccacaggcgctcaatgcctactatctacccaacaagaaccagatggtgttccccgcgggcatcctgcagcccaccctgtacgaccctgacttcccacagtctctcaactacgggggcatcggcaccatcattggacatgagctgacccacggctacgacgactgggggggccagtatgaccgctcagggaacctgctgcactggtggacggaggcctcctacagccgcttcctgcgaaaggctgagtgcatcgtccgtctctatgacaacttcactgtctacaaccagcgggtgaacgggaaacacacgcttggggagaacatcgcagatatgggcgtcctcaagctggcctaccacgcctatcagaagtgggtgcgggagcacggcccagagcacccacttccccggctcaagtacacacatgaccagctcttcttcattgcctttgcccagaactggtgcatcaagcggcggtcgcagtccatctacctgcaggtgctgactgacaagcatgcccctgagcactacagggtgctgggcagtgtgtcccagtttgaggagtttggccgggctttccactgtcccaaggactcacccatgaaccctgcccacaagtgttccgtgtggtgagcctggctgcccgcctgcacgcccccactgcccccgcacgaatcacctcctgctggctaccggggcaggcatgcacccggtgccagccccgctctgggcaccacctgccttccagcccctccaggacccggtccccctgctgcccctcacttcaggaggggcctggagcagggtgaggctggactttggggggctgtgagggaaatatactggggtccccagattctgctctaagggggccagaccctctgccaggctggattgtacgggccccaccttcgctgtgttcttgctgcaaagtctggtcaataaatcactgcactgttaaaaaaaaa

SEQ ID NO: 32 - DNA, 2664 bp, Homo sapien
gagagaacagcgtgagcctgtgtgcttgtgtgctgagccctcatcccctcctggggccaggcttgggtttcacctgcagaatcgcttgtgctgggctgcctgggctgtcctcagtggcacctgcatgaagccgttctggctgccagagctggacagccccaggaaaacccacctctctgcagagcttgcccagctgtccccgggaagccaaatgcctctcatgtaagtcttctgctcgacggggtgtctcctaaaccctcactcttcagcctctgtttgaccatgaaatgaagtgactgagctctattctgtacctgccactctatttctggggtgacttttgtcagctgcccagaatctccaagccaggctggttctctgcatcctttcaatgacctgttttcttctgtaaccacaggttcggtggtgagaggaagcctcgcagaatccagcagaatcctcacagaatccagcagcagctctgctggggacatggtccatggtgcaacccacagcaaagccctgacctgacctcctgatgctcaggagaagccatgggcccctcctgtcctgtgttcctgtccttcacaaagctcagcctgtggtggctccttctgaccccagcaggtggagaggaagctaagcgcccacctcccagggctcctggagacccactctcctctcccagtcccacggcattgccgcagggaggctcgcataccgagactgaggaccggctcttcaaacacctcttccggggctacaaccgctgggcgcgcccggtgcccaacacttcagacgtggtgattgtgcgctttggactgtccatcgctcagctcatcgatgtggatgagaagaaccaaatgatgaccaccaacgtctggctaaaacaggagtggagcgactacaaactgcgctggaaccccgctgattttggcaacatcacatctctcagggtcccttctgagatgatctggatccccgacattgttctctacaacaatgcagatggggagtttgcagtgacccacatgaccaaggcccacctcttctccacgggcactgtgcactgggtgcccccggccatctacaagagctcctgcagcatcgacgtcaccttcttccccttcgaccagcagaactgcaagatgaagtttggctcctggacttatgacaaggccaagatcgacctggagcagatggagcagactgtggacctgaaggactactgggagagcggcgagtgggccatcgtcaatgccacgggcacctacaacagcaagaagtacgactgctgcgccgagatctaccccgacgtcacctacgccttcgtcatccggcggctgccgctcttctacaccatcaacctcatcatcccctgcctgctcatctcctgcctcactgtgctggtcttctacctgccctccgactgcggcgagaagatcacgctgtgcatttcggtgctgctgtcactcaccgtcttcctgctgctcatcactgagatcatcccgtccacctcgctggtcatcccgctcatcggcgagtacctgctgttcaccatgatcttcgtcaccctgtccatcgtcatcaccgtcttcgtgctcaatgtgcaccaccgctcccccagcacccacaccatgccccactgggtgcggggggcccttctgggctgtgtgccccggtggcttctgatgaaccggcccccaccacccgtggagctctgccaccccctacgcctgaagctcagcccctcttatcactggctggagagcaacgtggatgccgaggagagggaggtggtggtggaggaggaggacagatgggcatgtgcaggtcatgtggccccctctgtgggcaccctctgcagccacggccacctgcactctggggcctcaggtcccaaggctgaggctctgctgcaggagggtgagctgctgctatcaccccacatgcagaaggcactggaaggtgtgcactacattgccgaccacctgcggtctgaggatgctgactcttcggtgaaggaggactggaagtatgttgccatggtcatcgacaggatcttcctctggctgtttatcatcgtctgcttcctggggaccatcggcctctttctgcctccgttcctagctggaatgatctgactgcacctccctcgagctggctcccagggcaaaggggagggttcttggatgtggaagggctttgaacaatgtttagatttggagatgagcccaaagtgccagggagaacagccaggtgaggtgggaggttggagagccaggtgaggtctctctaagtcaggctggggttgaagtttggagtctgtccgagtttgcagggtgctgagctgtatggtccagcaggggagtaataagggctcttccggaaggggaggaagcgggaggcaggcctgcacctgatgtggaggtacaggcagatcttccctaccggggagggatggatggttggatacaggtggctgggctattccatccatctggaagcacatttgagcctccaggcttctccttgacgtcattcctctccttccttgctgcaaaatggctctgcaccagccggcccccaggaggtctggcagagctgagagccatggcctgcaggggctccatatgtccctacgcgtgcagcaggcaaacaaga

SEQ ID NO: 33 - DNA, 887 bp, Homo sapien
ctctgtcctgggacttggtggtgctacccttggcctcccacagtcctgccaccctgctgccgccaccatgctgccccctgggactgcgaccctcttgactctgctcctggcagctggctcgctgggccagaagcctcagaggccacgccggcccgcatcccccatcagcaccatccagcccaaggccaattttgatgctcagcagtttgcagggacctggctccttgtggctgtgggctccgcttgccgtttcctgcaggagcagggccaccgggccgaggccaccacactgcatgtggctccccagggcacagccatggctgtcagtaccttccgaaagctggatgggatctgctggcaggtgcgccagctctatggagacacaggggtcctcggccgcttcctgcttcaagcccgaggcgcccgaggggctgtgaacgtggttgtcgctgagactgactaccagagtttcgctgtcctgtacctggagcgggcggggcagctgtcagtgaagctctacgcccgctcgctccctgtgagcgactcggtcctgagtgggtttgagcagcgggtccaggaggcccacctgactgaggaccagatcttctacttccccaagtacggcttctgcgaggctgcagaccagttccacgtcctggacgaagtgaggaggtgaggccggcacacagctccagtgctgagaagtcagtgccccgagagacgaccccaccagtggggtgcccgctgcctgtcctccgtgaaaccagcctcagatcagggccctgccacccagggcaggggatcttctgccggctgccccagaggacagtgggtggagtggtacctacttattaaatgtctcagaccccaaaaaaaaaaaaaaaaaa

SEQ ID NO: 34 - DNA, 1109 bp, Homo sapien
aagaacaattgtctctggacggcagctatgcgactcaccgtgctgtgtgctgtgtgcctgctgcctggcagcctggccctgccgctgcctcaggaggcgggaggcatgagtgagctacagtgggaacaggctcaggactatctcaagagattttatctctatgactcagaaacaaaaaatgccaacagtttagaagccaaactcaaggagatgcaaaaattctttggcctacctataactggaatgttaaactcccgcgtcatagaaataatgcagaagcccagatgtggagtgccagatgttgcagaatactcactatttccaaatagcccaaaatggacttccaaagtggtcacctacaggatcgtatcatatactcgagacttaccgcatattacagtggatcgattagtgtcaaaggctttaaacatgtggggcaaagagatccccctgcatttcaggaaagttgtatggggaactgctgacatcatgattggctttgcgcgaggagctcatggggactcctacccatttgatgggccaggaaacacgctggctcatgcctttgcgcctgggacaggtctcggaggagatgctcacttcgatgaggatgaacgctggacggatggtagcagtctagggattaacttcctgtatgctgcaactcatgaacttggccattctttgggtatgggacattcctctgatcctaatgcagtgatgtatccaacctatggaaatggagatccccaaaattttaaactttcccaggatgatattaaaggcattcagaaactatatggaaagagaagtaattcaagaaagaaatagaaacttcaggcagaacatccattcattcattcattggattgtatatcattgttgcacaatcagaattgataagcactgttcctccactccatttagcaattatgtcacccttttttattgcagttggtttttgaatgtctttcactccttttattggttaaactcctttatggtgtgactgtgtcttattccatctatgagctttgtcagtgcgcgtagatgtcaataaatgttacatacacaaataaataaaatatttaggccatggtaaatttacc

SEQ ID NO: 35 - DNA, 1504 bp, Homo sapien
gagcgagcaccttcgacgcggtccggggaccccctcgtcgctgtcctcccgacgcggacccgcgtgccccaggcctcgcgctgcccggccggctcctcgtgtcccactcccggcgcacgccctcccgcgcccctcttctcggcgcgcgcgcagcatggcgcccccgcaggtcctcgcgttcgggcttctgcttgccgcggcgacggcgacttttgccgcagctcaggaagaatgtgtctgtgaaaactacaagctggccgtaaactgctttgtgaataataatcgtcaatgccagtgtacttcagttggtgcacaaaatactgtcatttgctcaaagctggctgccaaatgtttggtgatgaaggcagaaatgaatggctcaaaacttgggagaagagcaaaacctgaaggggccctccagaacaatgatgggctttatgatcctgactgcgatgagagcgggctctttaaggccaagcagtgcaacggcacctccacgtgctggtgtgtgaacactgctggggtcagaagaacagacaaggacactgaaataacctgctctgagcgagtgagaacctactggatcatcattgaactaaaacacaaagcaagagaaaaaccttatgatagtaaaagtttgcggactgcacttcagaaggagatcacaacgcgttatcaactggatccaaaatttatcacgagtattttgtatgagaataatgttatcactattgatctggttcaaaattcttctcaaaaaactcagaatgatgtggacatagctgatgtggcttattattttgaaaaagatgttaaaggtgaatccttgtttcattctaagaaaatggacctgacagtaaatggggaacaactggatctggatcctggtcaaactttaatttattatgttgatgaaaaagcacctgaattctcaatgcagggtctaaaagctggtgttattgctgttattgtggttgtggtgatggcagttgttgctggaattgttgtgctggttatttccagaaagaagagaatggcaaagtatgagaaggctgagataaaggagatgggtgagatgcatagggaactcaatgcataactatataatttgaagattatagaagaagggaaatagcaaatggacacaaattacaaatgtgtgtgcgtgggacgaagacatctttgaaggtcatgagtttgttagtttaacatcatatatttgtaatagtgaaacctgtactcaaaatataagcagcttgaaactggctttaccaatcttgaaatttgaccacaagtgtcttatatatgcagatctaatgtaaaatccagaacttggactccatcgttaaaattatttatgtgtaacattcaaatgtgtgcattaaatatgcttccacagtaaaatctgaaaaactgatttgtgattgaaagctgcctttctatttacttgagtcttgtacatacatacttttttatgagctatgaaataaaacattttaaactg

SEQ ID NO: 36 - DNA, 777 bp, Homo sapien
gctccgggctgaagattgcttctcttctctcctccaaggtctagtgacggagcccgcgcgcgcgccaccatgcggcagaaggcggtatccgttttcttgtgctacctgctgctcttcacttgcagtggggtggaggcaggtaagaaaaagtgctcggagagctcggacagcggctccgggttctggaaggccctgaccttcatggccgtcggaggaggactcgcagtcgccgggctgcccgcgctgggcttcaccggcgccggcatcgcggccaactcggtggctgcctcgctgatgagctggtctgcgatcctgaatgggggcggcgtgcccgccggggggctagtggccacgctgcagagcctcggggctggtggcagcagcgtcgtcataggtaatattggtgccctgatgcggtacgccacccacaagtatctcgatagtgaggaggatgaggagtagccagcagctcccagaacctcttcttccttcttggcctaactcttccagttaggatctagaactttgcctttttttttttttttttttttttgagatgggttctcactatattgtccaggctagagtgcagtggctattcacagatgcgaacatagtacactgcagcctccaactcctagcctcaagtgatcctcctgtctcaacctcccaagtaggattacaagcatgcgccgacgatgcccagaatccagaactttgtctatcactctccccaacaacctagatgtgaaaacagaataaacttcacccagaaaa

SEQ ID NO: 37 - DNA, 3416 bp, Homo sapien
gccgccgagggcagccagcccctcccctacccggagcagcccgctggggccgtcccgagcggcgacacactaggagtcccggccggccagccagggcagccgcggtcccgggactcggccgtgagtgctgcgggacggatggtggcggcgggagcgcggagaccacggcgggcgccgtggagccgggcgccgtgcagccggagctgcgcgcggggcatgcggctgcgccccggcccctcggcccccggcctcggcccccgcgctccggccccagccccggccgccggcccccgcggagtgcagcgaccgcgccgccgctgagggaggcgccccaccatgccgcgggccccggcgccgctgtacgcctgcctcctggggctctgcgcgctcctgccccggctcgcaggtctcaacatatgcactagtggaagtgccacctcatgtgaagaatgtctgctaatccacccaaaatgtgcctggtgctccaaagaggacttcggaagcccacggtccatcacctctcggtgtgatctgagggcaaaccttgtcaaaaatggctgtggaggtgagatagagagcccagccagcagcttccatgtcctgaggagcctgcccctcagcagcaagggttcgggctctgcaggctgggacgtcattcagatgacaccacaggagattgccgtgaacctccggcccggtgacaagaccaccttccagctacaggttcgccaggtggaggactatcctgtggacctgtactacctgatggacctctccctgtccatgaaggatgacttggacaatatccggagcctgggcaccaaactcgcggaggagatgaggaagctcaccagcaacttccggttgggatttgggtcttttgttgataaggacatctctcctttctcctacacggcaccgaggtaccagaccaatccgtgcattggttacaagttgtttccaaattgcgtcccctcctttgggttccgccatctgctgcctctcacagacagagtggacagcttcaatgaggaagttcggaaacagagggtgtcccggaaccgagatgcccctgaggggggctttgatgcagtactccaggcagccgtctgcaaggagaagattggctggcgaaaggatgcactgcatttgctggtgttcacaacagatgatgtgccccacatcgcattggatggaaaattgggaggcctggtgcagccacacgatggccagtgccacctgaacgaggccaacgagtacacagcatccaaccagatggactatccatcccttgccttgcttggagagaaattggcagagaacaacatcaacctcatctttgcagtgacaaaaaaccattatatgctgtacaagaattttacagccctgatacctggaacaacggtggagattttagatggagactccaaaaatattattcaactgattattaatgcatacaatagtatccggtctaaagtggagttgtcagtctgggatcagcctgaggatcttaatctcttctttactgctacctgccaagatggggtatcctatcctggtcagaggaagtgtgagggtctgaagattggggacacggcatcttttgaagtatcattggaggcccgaagctgtcccagcagacacacggagcatgtgtttgccctgcggccggtgggattccgggacagcctggaggtgggggtcacctacaactgcacgtgcggctgcagcgtggggctggaacccaacagcgccaggtgcaacgggagcgggacctatgtctgcggcctgtgtgagtgcagccccggctacctgggcaccaggtgcgagtgccaggatggggagaaccagagcgtgtaccagaacctgtgccgggaggcagagggcaagccactgtgcagcgggcgtggggactgcagctgcaaccagtgctcctgcttcgagagcgagtttggcaagatctatgggcctttctgtgagtgcgacaacttctcctgtgccaggaacaagggagtcctctgctcaggccatggcgagtgtcactgcggggaatgcaagtgccatgcaggttacatcggggacaactgtaactgctcgacagacatcagcacatgccggggcagagatggccagatctgcagcgagcgtgggcactgtctctgtgggcagtgccaatgcacggagccgggggcctttggggagatgtgtgagaagtgccccacctgcccggatgcatgcagcaccaagagagattgcgtcgagtgcctgctgctccactctgggaaacctgacaaccagacctgccacagcctatgcagggatgaggtgatcacatgggtggacaccatcgtgaaagatgaccaggaggctgtgctatgtttctacaaaaccgccaaggactgcgtcatgatgttcacctatgtggagctccccagtgggaagtccaacctgaccgtcctcagggagccagagtgtggaaacacccccaacgccatgaccatcctcctggctgtggtcggtagcatcctccttgttgggcttgcactcctggctatctggaagctgcttgtcaccatccacgaccggagggagtttgcaaagtttcagagcgagcgatccagggcccgctatgaaatggcttcaaatccattatacagaaagcctatctccacgcacactgtggacttcaccttcaacaagttcaacaaatcctacaatggcactgtggactgatgtttccttctccgaggggctggagcggggatctgatgaaaaggtcagactgaaacgccttgcacggctgctcggcttgatcacagctccctaggtaggcaccacagagaagaccttctagtgagcctgggccaggagcccacagtgctgtacaacaagggaaaggtagcctggccatgtcacctggctgctagccagagccatgccaggttcgcgtccctaagagcttgggataaagcaaggggaccttggcgctctcagctttccctgccacatccagcttgttgtcccaatgaaatactgagatgctgggctgtctctcccttccaggaatcgtgggcccccagcctggccagacaagaagactgtcaggaagggtcggagtctgtaaaaccagcatacagtttggcttttttcacattgatcatttttatatgaaataaaaagatcctgcatttatggtgtagttctgagtcctgagacttttctgcgtgatgctatgccttgcacacaggtgttggtgatggggctgttgagatgcctgttgaaggtacatcgtttgcaaatgtcagtttcctctcctgtccgtgtttgtttagtacttttataatgaaaagaaacaagattgtttgggattggaagtaaagattaaaaccaaaagaatttgtgtttgtctgccc

SEQ ID NO: 38 - DNA, 2148 bp, Homo sapien
cgactcactatagggcgaattgaatttagcggccgcgaattcgcccttatgctgccacaaataccctttttgctgctagtatccttgaacttggttcatggagtgttttacgctgaacgataccaaatgcccacaggcataaaaggcccactacccaacaccaagacacagttcttcattccctacaccataaagagtaaaggtatagcagtaagaggagagcaaggtactcctggtccaccaggccctgctggacctcgagggcacccaggtccttctggaccaccaggaaaaccaggctacggaagtcctggactccaaggagagccagggttgccaggaccaccgggaccatcagctgtagggaaaccaggtgtgccaggactcccaggaaaaccaggagagagaggaccatatggaccaaaaggagatgttggaccagctggcctaccaggaccccggggcccaccaggaccacctggaatccctggaccggctggaatttctgtgccaggaaaacctggacaacagggacccacaggagccccaggacccaggggctttcctggagaaaagggtgcaccaggagtccctggtatgaatggacagaaaggggaaatgggatatggtgctcctggtcgtccaggtgagaggggtcttccaggccctcagggtcccacaggaccatctggccctcctggagtgggaaaaagaggtgaaaatggggttccaggacagccaggcatcaaaggtgatagaggttttccgggagaaatgggaccaattggcccaccaggtccccaaggccctcctggggaacgagggccagaaggcattggaaagccaggagctgctggagccccaggccagccagggattccaggaacaaaaggtctccctggggctccaggaatagctgggcccccagggcctcctggctttgggaaaccaggcttgccaggcctgaagggagaaagaggacctgctggccttcctgggggtccaggtgccaaaggggaacaagggccagcaggtcttcctgggaagccaggtctgactggaccccctgggaatatgggaccccaaggaccaaaaggcatcccgggtagccatggtctcccaggccctaaaggtgagacagggccagctgggcctgcaggataccctggggctaagggtgaaaggggttcccctgggtcagatggaaaaccagggtacccaggaaaaccaggtctcgatggtcctaagggtaacccagggttaccaggtccaaaaggtgatcctggagttggaggacctcctggtctcccaggccctgtgggcccagcaggagcaaagggaatgcccggacacaatggagaggctggcccaagaggtgcccctggaataccaggtactagaggccctattgggccaccaggcattccaggattccctgggtctaaaggggatccaggaagtcccggtcctcctggcccagctggcatagcaactaagggcctcaatggacccaccgggccaccagggcctccaggtccaagaggccactctggagagcctggtcttccagggccccctgggcctccaggcccaccaggtcaagcagtcatgcctgagggttttataaaggcaggccaaaggcccagtctttctgggacccctcttgttagtgccaaccagggggtaacaggaatgcctgtgtctgcttttactgttattctctccaaagcttacccagcaataggaactcccataccatttgataaaattttgtataacaggcaacagcattatgacccaaggactggaatctttacttgtcagataccaggaatatactatttttcataccacgtgcatgtgaaagggactcatgtttgggtaggcctgtataagaatggcacccctgtaatgtacacctatgatgaatacaccaaaggctacctggatcaggcttcagggagtgccatcatcgatctcacagaaaatgaccaggtgtggctccagcttcccaatgccgagtcaaatggcctatactcctctgagtatgtccactcctctttctcaggattcctagtggctccaatgtgagtacaagggcgaattcgtttaaacctgcaggactagtccctttagtgagggttaatt

SEQ ID NO: 39 - DNA, 1846 bp, Homo sapien
gttggtgaccaagagtacatctcttttcaaatagctggattaggtcctcatgctgctgtggtcattgctggtcatctttgatgcagtcactgaacaggcagattcgctgacccttgtggcgccctcttctgtcttcgaaggagacagcatcgttctgaaatgccagggagaacagaactggaaaattcagaagatggcttaccataaggataacaaagagttatctgttttcaaaaaattctcagatttccttatccaaagtgcagttttaagtgacagtggtaactatttctgtagtaccaaaggacaactctttctctgggataaaacttcaaatatagtaaagataaaagtccaagagctctttcaacgtcctgtgctgactgccagctccttccagcccatcgaagggggtccagtgagcctgaaatgtgagacccggctctctccacagaggttggatgttcaactccagttctgcttcttcagagaaaaccaggtcctggggtcaggctggagcagctctccggagctccagatttctgccgtgtggagtgaagacacagggtcttactggtgcaaggcagaaacggtgactcacaggatcagaaaacagagcctccaatcccagattcacgtgcagagaatccccatctctaatgtaagcttggagatccgggcccccgggggacaggtgactgaaggacaaaaactgatcctgctctgctcagtggctgggggtacaggaaatgtcacattctcctggtacagagaggccacaggaaccagtatgggaaagaaaacccagcgttccctgtcagcagagctggagatcccagctgtgaaagagagtgatgccggcaaatattactgtagagctgacaacggccatgtgcctatccagagcaaggtggtgaatatccctgtgagaattccagtgtctcgccctgtcctcaccctcaggtctcctggggcccaggctgcagtgggggacctgctggagcttcactgtgaggccctgagaggctctcccccaatcttgtaccaattttatcatgaggatgtcacccttgggaacagctcggccccctctggaggaggggcctccttcaacctctctttgactgcagaacattctggaaactactcctgtgaggccaacaacggcctgggggcccagtgcagtgaggcagtgccagtctccatctcaggacctgatggctatagaagagacctcatgacagctggagttctctggggactgtttggtgtccttggtttcactggtgttgctttgctgttgtatgccttgttccacaagatatcaggagaaagttctgccactaatgaacccagaggggcttccaggccaaatcctcaagagttcacctattcaagcccaaccccagacatggaggagctgcagccagtgtatgtcaatgtgggctctgtagatgtggatgtggtttattctcaggtctggagcatgcagcagccagaaagctcagcaaacatcaggacacttctggagaacaaggactcccaagtcatctactcttctgtgaagaaatcataacacttggaggaatcagaagggaagatcaacagcaaggatggggcatcattaagacttgctataaaaccttatgaaaatgcttgaggcttatcacctgccacagccagaacgtgcctcaggaggcacctcctgtcatttttgtcctgatgatgtttcttctccaatatcttcttttacctatcaatattcattgaactgctgctacatccagacactgtgcaaataaattatttctgctaccttcaaaaaaaaaaaaaaaaaaaaatgcag

SEQ ID NO: 40 - DNA, 1524 bp, Homo sapien
ggcacgaggctgcgccagggcctgagcggaggcgggggcagcctcgccagcgggggccccgggcctggccatgcctcactgagccagcgcctgcgcctctacctcgccgacagctggaaccagtgcgacctagtggctctcacctgcttcctcctgggcgtgggctgccggctgaccccgggtttgtaccacctgggccgcactgtcctctgcatcgacttcatggttttcacggtgcggctgcttcacatcttcacggtcaacaaacagctggggcccaagatcgtcatcgtgagcaagatgatgaaggacgtgttcttcttcctcttcttcctcggcgtgtggctggtagcctatggcgtggccacggaggggctcctgaggccacgggacagtgacttcccaagtatcctgcgccgcgtcttctaccgtccctacctgcagatcttcgggcagattccccaggaggacatggacgtggccctcatggagcacagcaactgctcgtcggagcccggcttctgggcacaccctcctggggcccaggcgggcacctgcgtctcccagtatgccaactggctggtggtgctgctcctcgtcatcttcctgctcgtggccaacatcctgctggtcaacttgctcattgccatgttcagttacacattcggcaaagtacagggcaacagcgatctctactggaaggcgcagcgttaccgcctcatccgggaattccactctcggcccgcgctggccccgccctttatcgtcatctcccacttgcgcctcctgctcaggcaattgtgcaggcgaccccggagcccccagccgtcctccccggccctcgagcatttccgggtttacctttctaaggaagccgagcggaagctgctaacgtgggaatcggtgcataaggagaactttctgctggcacgcgctagggacaagcgggagagcgactccgagcgtctgaagcgcacgtcccagaaggtggacttggcactgaaacagctgggacacatccgcgagtacgaacagcgcctgaaagtgctggagcgggaggtccagcagtgtagccgcgtcctggggtgggtggccgaggccctgagccgctctgccttgctgcccccaggtgggccgccaccccctgacctgcctgggtccaaagactgagccctgctggcggacttcaaggagaagcccccacaggggattttgctcctagagtaaggctcatctgggcctcggcccccgcacctggtggccttgtccttgaggtgagccccatgtccatctgggccactgtcaggaccacctttgggagtgtcatccttacaaaccacagcatgcccggctcctcccagaaccagtcccagcctgggaggatcaaggcctggatcccgggccgttatccatctggaggctgcagggtccttggggtaacagggaccacagacccctcaccactcacagattcctcacactggggaaataaagccatttcagaggaaaaaaaaaaaaaaaaaa

SEQ ID NO: 41 - DNA, 2664 bp, Homo sapien; identical to SEQ ID NO: 32

SEQ ID NO: 42 - DNA, 1195 bp, Homo sapien; identical to SEQ ID NO: 16

SEQ ID NO: 43 - DNA, 4061 bp, Homo sapien
ggtctggaagcagagccggcggagggagcgccggggccctgggctgcaggaggttgcggcggccgcggcagcatggtggtgccggagaaggagcagagctggatccccaagatcttcaagaagaagacctgcacgacgttcatagttgactccacagatccgggagggaccttgtgccagtgtgggcgcccccggaccgcccaccccgcagtggccatggaggatgccttcggggcagccgtggtgaccgtgtgggacagcgatgcacacaccacggagaagcccaccgatgcctacggagagctggacttcacgggggccggccgcaagcacagcaatttcctccggctctctgaccgaacggatccagctgcagtttatagtctggtcacacgcacatggggcttccgtgccccgaacctggtggtgtcagtgctggggggatcggggggccccgtcctccagacctggctgcaggacctgctgcgtcgtgggctggtgcgggctgcccagagcacaggagcctggattgtcactgggggtctgcacacgggcatcggccggcatgttggtgtggctgtacgggaccatcagatggccagcactgggggcaccaaggtggtggccatgggtgtggccccctggggtgtggtccggaatagagacaccctcatcaaccccaagggctcgttccctgcgaggtaccggtggcgcggtgacccggaggacggggtccagtttcccctggactacaactactcggccttcttcctggtggacgacggcacacacggctgcctggggggcgagaaccgcttccgcttgcgcctggagtcctacatctcacagcagaagacgggcgtgggagggactggaattgacatccctgtcctgctcctcctgattgatggtgatgagaagatgttgacgcgaatagagaacgccacccaggctcagctcccatgtctcctcgtggctggctcagggggagctgcggactgcctggcggagaccctggaagacactctggccccagggagtgggggagccaggcaaggcgaagcccgagatcgaatcaggcgtttctttcccaaaggggaccttgaggtcctgcaggcccaggtggagaggattatgacccggaaggagctcctgacagtctattcttctgaggatgggtctgaggaattcgagaccatagttttgaaggcccttgtgaaggcctgtgggagctcggaggcctcagcctacctggatgagctgcgtttggctgtggcttggaaccgcgtggacattgcccagagtgaactctttcggggggacatccaatggcggtccttccatctcgaagcttccctcatggacgccctgctgaatgaccggcctgagttcgtgcgcttgctcatttcccacggcctcagcctgggccacttcctgaccccgatgcgcctggcccaactctacagcgcggcgccctccaactcgctcatccgcaaccttttggaccaggcgtcccacagcgcaggcaccaaagccccagccctaaaagggggagctgcggagctccggccccctgacgtggggcatgtgctgaggatgctgctggggaagatgtgcgcgccgaggtacccctccgggggcgcctgggaccctcacccaggccagggcttcggggagagcatgtatctgctctcggacaaggccacctcgccgctctcgctggatgctggcctcgggcaggccccctggagcgacctgcttctttgggcactgttgctgaacagggcacagatggccatgtacttctgggagatgggttccaatgcagtttcctcagctcttggggcctgtttgctgctccgggtgatggcacgcctggagcctgacgctgaggaggcagcacggaggaaagacctggcgttcaagtttgaggggatgggcgttgacctctttggcgagtgctatcgcagcagtgaggtgagggctgcccgcctcctcctccgtcgctgcccgctctggggggatgccacttgcctccagctggccatgcaagctgacgcccgtgccttctttgcccaggatggggtacagtctctgctgacacagaagtggtggggagatatggccagcactacacccatctgggccctggttctcgccttcttttgccctccactcatctacacccgcctcatcaccttcaggaaatcagaagaggagcccacacgggaggagctagagtttgacatggatagtgtcattaatggggaagggcctgtcgggacggcggacccagccgagaagacgccgctgggggtcccgcgccagtcgggccgtccgggttgctgcgggggccgctgcggggggcgccggtgcctacgccgctggttccacttctggggcgcgccggtgaccatcttcatgggcaacgtggtcagctacctgctgttcctgctgcttttctcgcgggtgctgctcgtggatttccagccggcgccgcccggctccctggagctgctgctctatttctgggctttcacgctgctgtgcgaggaactgcgccagggcctgagcggaggcgggggcagcctcgccagcgggggccccgggcctggccatgcctcactgagccagcgcctgcgcctctacctcgccgacagctggaaccagtgcgacctagtggctctcacctgcttcctcctgggcgtgggctgccggctgaccccgggtttgtaccacctgggccgcactgtcctctgcatcgacttcatggttttcacggtgcggctgcttcacatcttcacggtcaacaaacagctggggcccaagatcgtcatcgtgagcaagatgatgaaggacgtgttcttcttcctcttcttcctcggcgtgtggctggtagcctatggcgtggccacggaggggctcctgaggccacgggacagtgacttcccaagtatcctgcgccgcgtcttctaccgtccctacctgcagatcttcgggcagattccccaggaggacatggacgtggccctcatggagcacagcaactgctcgtcggagcccggcttctgggcacaccctcctggggcccaggcgggcacctgcgtctcccagtatgccaactggctggtggtgctgctcctcgtcatcttcctgctcgtggccaacatcctgctggtcaacttgctcattgccatgttcagttacacattcggcaaagtacagggcaacagcgatctctactggaaggcgcagcgttaccgcctcatccgggaattccactctcggcccgcgctggccccgccctttatcgtcatctcccacttgcgcctcctgctcaggcaattgtgcaggcgaccccggagcccccagccgtcctccccggccctcgagcatttccgggtttacctttctaaggaagccgagcggaagctgctaacgtgggaatcggtgcataaggagaactttctgctggcacgcgctagggacaagcgggagagcgactccgagcgtctgaagcgcacgtcccagaaggtggacttggcactgaaacagctgggacacatccgcgagtacgaacagcgcctgaaagtgctggagcgggaggtccagcagtgtagccgcgtcctggggtgggtggccgaggccctgagccgctctgccttgctgcccccaggtgggccgccaccccctgacctgcctgggtccaaagactgagccctgctggcggacttcaaggagaagcccccacaggggattttgctcctagagtaaggctcatctgggcctcggcccccgcacctggtggccttgtccttgaggtgagccccatgtccatctgggccactgtcaggaccacctttgggagtgtcatccttacaaaccacagcatgcccggctcctcccagaaccagtcccagcctgggaggatcaaggcctggatcccgggccgttatccatctggaggctgcagggtccttggggtaacagggaccacagacccctcaccactcacagattcctcacactggggaaataaagccatttcagaggaaaaaaaa

SEQ ID NO: 44 - DNA, 8035 bp, Homo sapien
cgataattgaaaacccagatgtcccacaggatttcgggaatcaagggtcaacagtagagtccctctgtgatgatgttgtctctgtactcaccgtcctgtgtgagaagctgcaagccgccataaatgacagccagcagctgcagcttctctacctggagtgcatcctgtctgtgctcagcagctcctcctcctccatgcacctgcacaggcgcttcacggacctgatctggaaaaacctctgccctgctctcatcgtgatcttggggaatccaattcatgacaaaaccatcacctctgctcacaccagcagcaccagtaccagcctggagtcggactctgcgtctccgggagtgtctgaccacggccgaggatcaggctgctcctgcactgcgccggccctgagcggacctgtggctcggactatctattacatcgcagccgagctggtccggctggtggggtctgtggactccatgaagcccgtgctccagtccctctaccaccgagtgctgctctaccccccaccccagcaccgggtggaagccatcaaaataatgaaagagatacttgggagcccacagcgtctctgtgacttggcaggacccagctccactgaatcagagtccagaaaaagatcaatttcaaaaagaaagtctcatctggatctcctcaaactcatcatggatggcatgaccgaagcatgcatcaagggtggcatcgaagcttgctatgcagccgtgtcctgtgtctgcaccttgctgggtgccctggatgagctcagccaggggaagggcttgagcgaaggtcaggtgcaactgctgcttctgcgccttgaggagctgaaggatggggctgagtggagccgagattccatggagatcaatgaggctgacttccgctggcagcggcgagtgctgtcctcagaacacacgccgtgggagtcagggaacgagaggagccttgacatcagcatcagtgtcaccacagacacaggccagaccactctcgagggagagttgggtcagactacacccgaggaccattcgggaaaccacaagaacagtctcaagtcgccagccatcccagagggtaaggagacgctgagcaaagtattggaaacagaggcggtagaccagccagatgtcgtgcagagaagccacacggtcccttaccctgacataactaacttcctgtcagtagactgcaggacaaggtcctatggatctaggtatagtgagagcaattttagcgttgatgaccaagacctttctaggacagagtttgattcctgtgatcagtactctatggcagcagaaaaggactcgggcaggtccgacgtgtcagacattgggtcggacaactgttcactagccgatgaagagcagacaccccgggactgcctaggccaccggtccctgcgaactgccgccctgtctctaaaactgctgaagaaccaggaggcggatcagcacagcgccaggctgttcatacagtccctggaaggcctcctccctcggctcctgtctctctccaatgtagaggaggtggacaccgctctgcagaactttgcctctactttctgctcaggcatgatgcactctcctggctttgacgggaatagcagcctcagcttccagatgctgatgaacgcagacagcctctacacagctgcacactgcgccctgctcctcaacctgaagctctcccacggtgactactacaggaagcggccgaccctggcgccaggcgtgatgaaggacttcatgaagcaggtgcagaccagcggcgtgctgatggtcttctctcaggcctggattgaggagctctaccatcaggtgctcgacaggaacatgcttggagaggctggctattggggcagcccagaagataacagccttcccctcatcacaatgctgaccgatattgacggcttagagagcagtgccattggtggccagctgatggcctcggctgctacagagtctcctttcgcccagagcaggagaattgatgactccacagtggcaggcgtggcatttgctcgctatattctggtgggctgctggaagaacttgatcgatactttatcaaccccactgactggtcgaatggcggggagctccaaagggctggccttcattctgggagctgaaggcatcaaagagcagaaccagaaggagcgggacgccatctgcatgagcctcgacgggctgcggaaagccgcacggctgagctgcgctctaggcgttgctgctaactgcgcctcagcccttgcccagatggcagctgcctcctgtgtccaagaagaaaaagaagagagggaggcccaagaacccagtgatgccatcacacaagtgaaactaaaagtggagcagaaactggagcagattgggaaggtgcagggggtgtggctgcacactgcccacgtcttgtgcatggaggccatcctcagcgtaggcctggagatgggaagccacaacccggactgctggccacacgtgttcagggtgtgtgaatacgtgggcaccctggagcacaaccacttcagcgatggtgcctcgcagccccctctgaccatcagccagccccagaaggccactggaagcgctggcctccttggggaccccgagtgtgagggctcgccccccgagcacagcccggagcaggggcgctccctgagcacggcccctgtcgtccagcccctgtccatccaggacctcgtccgggaaggcagccggggtcgggcctccgacttccgcggcgggagcctcatgagcgggagcagcgcggccaaggtggtgctcaccctctccacgcaagccgacaggctctttgaagatgctacggataagttgaacctcatggccttgggaggttttctttaccagctgaagaaagcatcgcagtctcagcttttccattctgttacagatacagttgattactctctggcaatgccaggagaagttaaatccactcaagaccgaaaaagcgccctccacctgttccgcctggggaatgccatgctgaggattgtgcggagcaaagcacggcccctgctccacgtgatgcgctgctggagccttgtggccccacacctggtggaggctgcttgccataaggaaagacatgtgtctcagaaggctgtttccttcatccatgacatactgacagaagtcctcactgactggaatgagccacctcattttcacttcaatgaagcactcttccgacctttcgagcgcattatgcagctggaattgtgtgatgaggacgtccaagaccaggttgtcacatccattggtgagctggttgaagtgtgttccacgcagatccagtcgggatggagacccttgttcagtgccctggaaacagtgcatggcgggaacaagtcagagatgaaggagtacctggttggtgactactccatgggaaaaggccaagctccagtgtttgatgtatttgaagcttttctcaatactgacaacatccaggtctttgctaatgcagccactagctacatcatgtgccttatgaagtttgtcaaaggactgggggaggtggactgtaaagagattggagactgtgccccagcacccggagccccgtccacagacctgtgcctcccggccctggattacctcaggcgctgctctcagttattggccaaaatctacaaaatgcccttgaagccaatattccttagtgggagacttgccggcttgcctcgaagacttcaggaacagtcagccagcagtgaggatggaattgaatcagtcctgtctgattttgatgatgacaccggtctgatagaagtctggataatcctgctggagcagctgacagcggctgtgtccaattgtccacggcagcaccaaccaccaactctggatttactctttgagctgttgagagatgtgacgaaaacaccaggaccagggtttggtatctatgcagtggttcacctcctccttcctgtgatgtccgtttggctccgccggagccataaagaccattcctactgggatatggcctctgccaatttcaagcacgctattggtctgtcctgtgagctggtggtggagcacattcaaagctttctacattcagatatcaggtacgagagcatgatcaataccatgctgaaggacctctttgagttgctggtcgcctgtgtggccaagcccactgaaaccatctccagagtgggctgctcctgtattagatacgtccttgtgacagcgggccctgtgttcactgaggagatgtggaggcttgcctgctgtgccctgcaagatgcgttctctgccacactcaagccagtgaaggacctgctgggctgcttccacagcggcacggagagcttcagcggggaaggctgccaggtgcgagtggcggccccgtcctcctccccaagtgccgaggccgagtactggcgcatccgagccatggcccagcaggtgtttatgctggacacccagtgctcaccaaagacaccaaacaactttgaccacgctcagtcctgccagctcattattgagctgcctcctgatgaaaaaccaaatggacacaccaagaaaagcgtgtctttcagggaaattgtggtgagcctgctgtctcatcaggtgttactccagaacttatatgacatcttgttagaagagtttgtcaaaggcccctctcctggagaggaaaagacgatacaagtgccagaagccaagctggctggcttcctcagatacatctctatgcagaacttggcagtcatattcgacctgctgctggactcttataggactgccagggagtttgacaccagccccgggctgaagtgcctgctgaagaaagtgtctggcatcgggggcgccgccaacctctaccgccagtctgcgatgagctttaacatttatttccacgccctggtgtgtgctgttctcaccaatcaagaaaccatcacggccgagcaagtgaagaaggtcctttttgaggacgacgagagaagcacggattcttcccagcagtgttcatctgaggatgaagacatctttgaggaaaccgcccaggtcagccccccgagaggcaaggagaagagacagtggcgggcacggatgcccttgctcagcgtccagcctgtcagcaacgcagattgggtgtggctggtcaagaggctgcacaagctgtgcatggaactgtgcaacaactacatccagatgcacttggacctggagaactgtatggaggagcctcccatcttcaagggcgacccgttcttcatcctgccctccttccagtccgagtcatccaccccatccaccgggggcttctctgggaaagaaaccccttccgaggatgacagaagccagtcccgggagcacatgggcgagtccctgagcctgaaggccggtggtggggacctgctgctgccccccagccccaaagtggagaagaaggatcccagccggaagaaggagtggtgggagaatgcggggaacaaaatctacaccatggcagccgacaagaccatttcaaagttgatgaccgaatacaaaaagaggaaacagcagcacaacctgtccgcgttccccaaagaggtcaaagtggagaagaaaggagagccactgggtcccaggggccaggactccccgctgcttcagcgtccccagcacttgatggaccaagggcaaatgcggcattccttcagcgcaggccccgagctgctgcgacaggacaagaggccccgctcaggctccaccgggagctccctcagtgtctcggtgagagacgcagaagcacagatccaggcatggaccaacatggtgctaacagttctcaatcagattcagattctcccagaccagaccttcacggccctccagcccgcagtgttcccgtgcatcagtcagctgacctgtcacgtgaccgacatcagagttcgccaggctgtgagggagtggctgggcagggtgggccgtgtctatgacatcattgtgtagccgactcctgttctactctcccaccaaataacagtagtgagggttagagtcctgccaatacagctgttgcattttccccaccactagccccacttaaactactactactgtctcagagaacagtgtttcctaatgtaaaaagcctttccaaccactgatcagcattggggccatactaaggtttgtatctagatgacacaaacgatattctgattttgcacattattatagaagaatctataatccttgatatgtttctaactcttgaagtatatttcccagtgcttttgcttacagtgttgtccccaaatgggtcattttcaaggattactcatttgaaaacactatattgatccatttgatccatcatttaaaaaataaatacaattcctaaggcaatatctgctggtaagtcaagctgataaacactcagacatctagtaccagggattattaattggaggaagatttatggttatgggtctggctgggaagaagacaactataaatacatattcttgggtgtcataatcaagaaagaggtgacttctgttgtaaaataatccagaacacttcaaaattattcctaaatcattaagattttcaggtattcaccaatttccccatgtaaggtactgtgttgtacctttatttctgtatttctaaaagaagaaagttctttcctagcagggtttgaagtctgtggcttatcagcctgtgacacagagtacccagtgaaagtggctggtacgtagattgtcaagagacataagaccgaccagccaccctggctgttcttgtggtgtttgtttccatccccaaggcaaacaaggaaaggaaaggaaagaagaaaaggtgccttagtcctttgttgcacttccatttccatgccccacaattgtctgaacataaggtatagcatttggtttttaagaaaacaaaacattaagacgcaactcattttatatcaacacgcttggaggaaagggactcagggaagggagcagggagtgtggggtggggatggattatgatgaaatcattttcaatcttaaaatataatacaacaatcttgcaaaattatggtgtcagttacacaagctctagtctcaaaatgaaagtaatggagaaagacactgaaatttagaaaattttgtcgatttaaaatatttctcctatctaccaagtaaagttaccctatgtttgatgtctttgcattcagaccaatatttcaggtggatatttctaagtattactagaaaatacgtttgaaagctttatcttattatttacagtatttttatatttcttacattatcctaatgattgaaaactcctcaatcaagcttacttacacacattctacagagttatttaaggcatacattataatctcccagccccattcataatgaataagtcaccctttaaatataagacacaaattctacagtattgaaataaggatttaaaggggtatttgtaaactttgccctccttgagaaatatggaactaccttagaggttaagaggaaggcagtgttctgacttctttaggtgatctgaaaaaaacacccttatcatccagtgtaccatctagagatcaccacagaatccatttttttcccagttccacaaaacactctgtttgccttcagtttttactcactagacaataattcaagtttagaaacaggtaatcagctatttgatcttaaaaggcaatgaattgttgggatatcagtgaactatgttgtatacttttgaatttttacattttataaatggaattgaaagttggataactgctttttttaaattttccaacagaagtaacaccacagttgctttgtttctttttatagcttacctgaggttcagttcttctttgtgaacctgtgagtactccacagtttactgggggaaaaggcttcagtaaagcagaggctagaattacagtatttatacatagcaacttttcataaagtagaaaaattcaaaggaagctgtctcaatttgagaataccagctgggcacggtcg

SEQ ID NO: 45 - DNA, 3136 bp, Homo sapien
cagagaggctgtatttcagtgcagcctgccagacctcttctggaggaagactggacaaagggggtcacacattccttccatacggttgagcctctacctgcctggtgctggtcacagttcagcttcttcatgatggtggatcccaatggcaatgaatccagtgctacatacttcatcctaataggcctccctggtttagaagaggctcagttctggttggccttcccattgtgctccctctaccttattgctgtgctaggtaacttgacaatcatctacattgtgcggactgagcacagcctgcatgagcccatgtatatatttctttgcatgctttcaggcattgacatcctcatctccacctcatccatgcccaaaatgctggccatcttctggttcaattccactaccatccagtttgatgcttgtctgctacagatttttgccatccactccttatctggcatggaatccacagtgctgctggccatggcttttgaccgctatgtggccatctgtcacccactgcgccatgccacagtacttacgttgcctcgtgtcaccaaaattggtgtggctgctgtggtgcggggggctgcactgatggcaccccttcctgtcttcatcaagcagctgcccttctgccgctccaatatcctttcccattcctactgcctacaccaagatgtcatgaagctggcctgtgatgatatccgggtcaatgtcgtctatggccttatcgtcatcatctccgccattggcctggactcacttctcatctccttctcatatctgcttattcttaagactgtgttgggcttgacacgtgaagcccaggccaaggcatttggcacttgcgtctctcatgtgtgtgctgtgttcatattctatgtacctttcattggattgtccatggtgcatcgctttagcaagcggcgtgactctccgctgcccgtcatcttggccaatatctatctgctggttcctcctgtgctcaacccaattgtctatggagtgaagacaaaggagattcgacagcgcatccttcgacttttccatgtggccacacacgcttcagagccctaggtgtcagtgatcaaacttcttttccattcagagtcctctgattcagattttaatgttaacattttggaagacagtattcagaaaaaaaatttccttaataaaaaatacaactcagatccttcaaatatgaaactggttggggaatctccattttttcaatattattttcttctttgttttcttgctacatataattattaataccctgactaggttgtggttggagggttattacttttcattttaccatgcagtccaaatctaaactgcttctactgatggtttacagcattctgagataagaatggtacatctagagaacatttgccaaaggcctaagcacggcaaaggaaaataaacacagaatataataaaatgagataatctagcttaaaactataacttcctcttcagaactcccaaccacattggatctcagaaaaatgctgtcttcaaaatgacttctacagagaagaaataatttttcctctggacactagcacttaaggggaagattggaagtaaagccttgaaaagagtacatttacctacgttaatgaaagttgacacactgttctgagagttttcacagcatatggaccctgtttttcctatttaattttcttatcaaccctttaattaggcaaagatattattagtaccctcattgtagccatgggaaaattgatgttcagtggggatcagtgaattaaatggggtcatacaagtataaaaattaaaaaaaaaaaagacttcatgcccaatctcatatgatgtggaagaactgttagagagaccaacagggtagtgggttagagatttccagagtcttacattttctagaggaggtatttaatttcttctcactcatccagtgttgtatttaggaatttcctggcaacagaactcatggctttaatcccactagctattgcttattgtcctggtccaattgccaattacctgtgtcttggaagaagtgatttctaggttcaccattatggaagattcttattcagaaagtctgcatagggcttatagcaagttatttatttttaaaagttccataggtgattctgataggcagtgaggttagggagccaccagttatgatgggaagtatggaatggcaggtcttgaagataacattggccttttgagtgtgactcgtagctggaaagtgagggaatcttcaggaccatgctttatttggggctttgtgcagtatggaacagggactttgagaccaggaaagcaatctgacttaggcatgggaatcaggcatttttgcttctgaggggctattaccaagggttaataggtttcatcttcaacaggatatgacaacagtgttaaccaagaaactcaaattacaaatactaaaacatgtgatcatatatgtggtaagtttcattttctttttcaatcctcaggttccctgatatggattcctataacatgctttcatccccttttgtaatggatatcatatttggaaatgcctatttaatacttgtatttgctgctggactgtaagcccatgagggcactgtttattattgaatgtcatctctgttcatcattgactgctctttgctcatcattgaatcccccagcaaagtgcctagaacataatagtgcttatgcttgacaccggttatttttcatcaaacctgattccttctgtcctgaacacatagccaggcaattttccagccttctttgagttgggtattattaaattctggccattacttccaatgtgagtggaagtgacatgtgcaatttctatacctggctcataaaaccctcccatgtgcagcctttcatgttgacattaaatgtgacttgggaagctatgtgttacacagagtaaatcaccagaagcctggatttctgaaaaaactgtgcagagccaaacctctgtcatttgcaactcccacttgtatttgtacgaggcagttggataagtgaaaaataaagtactattgtgtcaagaaaaaaaaaaaaaaaaaaaaaaaaaaaaaaaaaaaaaaaaaaaaaaaaaaaa

SEQ ID NO: 46 - DNA, 491 bp, Homo sapien
  Unsure 434-435, 450: Unknown base
agcaccttggcacagctgaagcagaggaacacgctgaaggatggtatcatcatgatccagacgctgctgatcatcctcttcatcatcgtgcctatcttcctgctgctggacaaggatgacagcaaggctggcatggaggaagatcacacctacgagggcctggacattgaccagacagccacctatgaggacatagtgacgctgcggacaggggaagtgaagtggtctgtaggtgagcacccaggccaggagtgagagccaggtcgccccatgacctgggtgcaggctccctggcctcagtgactgcttcggagctgcctggctcatggcccaacccctttcccggaccccccagctggcctctgaagctggcccaccagagctgccatttgtctcacccctggtgtccagctcttgccaaagggcctggagtnnaaggacaacaggcancacttggagggagttctctggggatggacgggacccacctt

SEQ ID NO: 47 - DNA, 1650 bp, Homo sapien
caggaaggttcctctcccagtggccatgggtagcaacagtgggcaggctggccgccacatctataaatccctagctgatgatggcccctttgactctgtggagccgcctaaaagacccaccagcagactcatcatgcacagcatggccatgttcggaagagagttctgctacgcggtggaggcagcgtatgtgaccccagtcctgctcagcgtaggtctgcccagcagcctgtacagcattgtgtggttcctcagccccatcctgggattcctgctgcagcccgtggtcggatcggccagcgaccactgccggtccaggtggggccgccggagaccctacatcctcaccctgggagtcatgatgctcgtgggcatggctctgtacctcaatggggctactgttgtagcagctttgattgctaacccaaggaggaagctggtttgggccataagtgtcaccatgataggtgtcgttctctttgattttgctgccgacttcattgatgggcccatcaaagcctacttatttgatgtctgctcccatcaggacaaggagaagggcctccactaccatgccctcttcacaggttttggaggtgccctgggttaccttttgggtgctatagactgggcccatctggagctgggaagactgttgggtacagaattccaggtcatgttcttcttctctgcattggtgctcactttgtgttttactgttcatctgtgcagtatctctgaagccccacttacagaggttgcaaagggcattcccccacagcaaacccctcaggaccctccattgtcatcagatggaatgtacgagtatggttctatcgagaaagttaaaaatggttacgtaaatccagagctggcaatgcagggagcaaaaaacaaaaatcatgctgaacagactcgcagggcaatgacattaaagtcactgctgagagcactggtgaacatgcctcctcactaccgctacctttgcatcagccacctcattggatggacggccttcctgtccaacatgctgttcttcacagatttcatgggccagattgtgtaccgcggggatccctatagtgcacacaactccacagagtttctcatctacgaaagaggagtcgaggttggatgttggggcttctgcatcaactccgtgttttcctcactttattcttactttcagaaagttttggtatcctacattggattaaagggtctttacttcacgggatatttgctgtttggcctggggacgggatttattgggctcttcccgaatgtctactccaccctggtcctgtgcagcctgtttggtgtaatgtccagcaccctgtacactgtgccctttaacctcattactgagtaccaccgcgaggaagaaaaggagaggcagcaggccccaggaggggacccagacaacagcgtgagagggaagggcatggactgcgccaccctcacatgcatggtgcagctggctcagatcctggtcggaggtggcctgggctttctggtcaacacagccgggaccgttgtcgtcgtggtgatcacagcgtctgcggtggcactgataggctgttgctttgtcgctctctttgttagatatgtggattaggtcaataaagagacaatgaccctaaaaaaaaa

SEQ ID NO: 48 - DNA, 3462 bp, Homo sapien
gaatcatccacgcacctgcagctctgctgagagagtgcaagccgtgggggttttgagctcatcttcatcattcatatgaggaaataagtggtaaaatccttggaaatacaatgagactcatcagaaacatttacatattttgtagtattgttatgacagcagagggtgatgctccagagctgccagaagaaagggaactgatgaccaactgctccaacatgtctctaagaaaggttcccgcagacttgaccccagccacaacgacactggatttatcctataacctcctttttcaactccagagttcagattttcattctgtctccaaactgagagttttgattctatgccataacagaattcaacagctggatctcaaaacctttgaattcaacaaggagttaagatatttagatttgtctaataacagactgaagagtgtaacttggtatttactggcaggtctcaggtatttagatctttcttttaatgactttgacaccatgcctatctgtgaggaagctggcaacatgtcacacctggaaatcctaggtttgagtggggcaaaaatacaaaaatcagatttccagaaaattgctcatctgcatctaaatactgtcttcttaggattcagaactcttcctcattatgaagaaggtagcctgcccatcttaaacacaacaaaactgcacattgttttaccaatggacacaaatttctgggttcttttgcgtgatggaatcaagacttcaaaaatattagaaatgacaaatatagatggcaaaagccaatttgtaagttatgaaatgcaacgaaatcttagtttagaaaatgctaagacatcggttctattgcttaataaagttgatttactctgggacgaccttttccttatcttacaatttgtttggcatacatcagtggaacactttcagatccgaaatgtgacttttggtggtaaggcttatcttgaccacaattcatttgactactcaaatactgtaatgagaactataaaattggagcatgtacatttcagagtgttttacattcaacaggataaaatctatttgcttttgaccaaaatggacatagaaaacctgacaatatcaaatgcacaaatgccacacatgcttttcccgaattatcctacgaaattccaatatttaaattttgccaataatatcttaacagacgagttgtttaaaagaactatccaactgcctcacttgaaaactctcattttgaatggcaataaactggagacactttctttagtaagttgctttgctaacaacacacccttggaacacttggatctgagtcaaaatctattacaacataaaaatgatgaaaattgctcatggccagaaactgtggtcaatatgaatctgtcatacaataaattgtctgattctgtcttcaggtgcttgcccaaaagtattcaaatacttgacctaaataataaccaaatccaaactgtacctaaagagactattcatctgatggccttacgagaactaaatattgcatttaattttctaactgatctccctggatgcagtcatttcagtagactttcagttctgaacattgaaatgaacttcattctcagcccatctctggattttgttcagagctgccaggaagttaaaactctaaatgcgggaagaaatccattccggtgtacctgtgaattaaaaaatttcattcagcttgaaacatattcagaggtcatgatggttggatggtcagattcatacacctgtgaataccctttaaacctaaggggaactaggttaaaagacgttcatctccacgaattatcttgcaacacagctctgttgattgtcaccattgtggttattatgctagttctggggttggctgtggccttctgctgtctccactttgatctgccctggtatctcaggatgctaggtcaatgcacacaaacatggcacagggttaggaaaacaacccaagaacaactcaagagaaatgtccgattccacgcatttatttcatacagtgaacatgattctctgtgggtgaagaatgaattgatccccaatctagagaaggaagatggttctatcttgatttgcctttatgaaagctactttgaccctggcaaaagcattagtgaaaatattgtaagcttcattgagaaaagctataagtccatctttgttttgtctcccaactttgtccagaatgagtggtgccattatgaattctactttgcccaccacaatctcttccatgaaaattctgatcatataattcttatcttactggaacccattccattctattgcattcccaccaggtatcataaactgaaagctctcctggaaaaaaaagcatacttggaatggcccaaggataggcgtaaatgtgggcttttctgggcaaaccttcgagctgctattaatgttaatgtattagccaccagagaaatgtatgaactgcagacattcacagagttaaatgaagagtctcgaggttctacaatctctctgatgagaacagattgtctataaaatcccacagtccttgggaagttggggaccacatacactgttgggatgtacattgatacaacctttatgatggcaatttgacaatatttattaaaataaaaaatggttattcccttcatatcagtttctagaaggatttctaagaatgtatcctatagaaacaccttcacaagtttataagggcttatggaaaaaggtgttcatcccaggattgtttataatcatgaaaaatgtggccaggtgcagtggctcactcttgtaatcccagcactatgggaggccaaggtgggtgacccacgaggtcaagagatggagaccatcctggccaacatggtgaaaccctgtctctactaaaaatacaaaaattagctgggcgtgatggtgcacgcctgtagtcccagctacttgggaggctgaggcaggagaatcgcttgaacccgggaggtggcagttgcagtgagctgagatcgagccactgcactccagcctggtgacagagcgagactccatctcaaaaaaaagaaaaaaaaaaaagaaaaaaatggaaaacatcctcatggccacaaaataaggtctaattcaataaattatagtacattaatgtaatataatattacatgccactaaaaagaataaggtagctgtatatttcctggtatggaaaaaacatattaatatgttataaactattaggttggtgcaaaactaattgtggtttttgccattgaaatggcattgaaataaaagtgtaaagaaatctataccagatgtagtaacagtggtttgggtctgggaggttggattacagggagcatttgatttctatgttgtgtatttctataatgtttgaattgtttagaatgaatctgtatttcttttataagtagaaaaaaaataaagatagtttttacagcct

SEQ ID NO: 49 - DNA, 4492 bp, Homo sapien
gtcacctggatggtgtaaaggaaacaagagacaggaacagagcccctcatctcacctctgggctaccatacagaaaagcagaattggcaggaactgaaaatgactaggaagaggacatactgggtgcccaactcttctggtggcctcgtgaatcgtggcatcgacataggcgatgacatggtttcaggacttatttataaaacctatactctccaagatggcccctggagtcagcaagagagaaatcctgaggctccagggagggcagctgtcccaccgtgggggaagtatgatgctgccttgagaaccatgattcccttccgtcccaagccgaggtttcctgccccccagcccctggacaatgctggcctgttctcctacctcaccgtgtcatggctcaccccgctcatgatccaaagcttacggagtcgcttagatgagaacaccatccctccactgtcagtccatgatgcctcagacaaaaatgtccaaaggcttcaccgcctttgggaagaagaagtctcaaggcgagggattgaaaaagcttcagtgcttctggtgatgctgaggttccagagaacaaggttgattttcgatgcacttctgggcatctgcttctgcattgccagtgtactcgggccaatattgattataccaaagatcctggaatattcagaagagcagttggggaatgttgtccatggagtgggactctgctttgccctttttctctccgaatgtgtgaagtctctgagtttctcctccagttggatcatcaaccaacgcacagccatcaggttccgagcagctgtttcctcctttgcctttgagaagctcatccaatttaagtctgtaatacacatcacctcaggagaggccatcagcttcttcaccggtgatgtaaactacctgtttgaaggggtgtgctatggacccctagtactgatcacctgcgcatcgctggtcatctgcagcatttcttcctacttcattattggatacactgcatttattgccatcttatgctatcccctggttttcccactggaggtattcatgacaagaatggctgtgaaggctcagcatcacacatctgaggtcagcgaccagcgcatccgtgtgaccagtgaagttctcacttgcattaagctgattaaaatgtacacatgggagaaaccatttgcaaaaatcattgaagacctaagaaggaaggaaaggaagctattggagaagtgcgggcttgtccagagcctgacaagtataaccttgttcatcatccccgcagtggccacagcggtctgggttctcatccacacatccttaaagctgaaactcacagcgtcaatggccttcagcatgctagcctccttgaatctccttcggctgtcagtgttctttgtgcctattgcagtcaaaggtctcacgaattccaagtctgcagtgatgaggttcaagaagtttttcctccaggagagccctgttttctatgtccagacattacaagaccccagcaaagctctggtctttgaggaggccaccttgtcatggcaacagacctgtcccgggatcgtcaatggggcactggagctggagaggaacgggcatgcttctgaggggatgaccaggcctagagatgccctcgggccagaggaagaagggaacagcctgggcccagagttgcacaagatcaacctggtggtgtccaaggggatgatgttaggggtctgcggcaacacggggagtggtaagagcagcctgttgtcagccatcctggaggagatgcacttgctcgagggctcggtgggggtgcagggaagcctggcctatgtcccccagcaggcctggatcgtcagcgggaacatcagggagaacatcctcatgggaggcgcatatgacaaggcccgatacctccaggtgctccactgctgctccctgaatcgggacctggaacttctgccctttggagacatgacagagattggagagcggggccccaacctctctggggggcagaaacagaggatcagcctggcccgcgccgtctattccgaccgtcagatctacctgctggacgaccccctgtctgctgtggacgcccacgtggggaagcacatttttgaggagtgcattaagaagacactcagggggaagacggtcgtccaggtgacccaccagctgcagtacttagaattttgtggccaggtcattttgttggaaaatgggaaaatctgtgaaaatggaactcacagtgagttaatgcagaaaaaggggaaatatgcccaacttatccagaagatgcacaaggaagccacttcggacatgttgcaggacacagcaaagatagcagagaagccaaaggtagaaagtcaggctctggccacctccctggaagagtctctcaacggaaatgctgtgccggagcatcagctcacacaggaggaggagatggaagaaggctccttgagttggagggtctaccaccactacatccaggcagctggaggttacatggtctcttgcataattttcttctttgtggtgctgatcgtcttcttaacgatcttcagcttctggtggctgagctactggttggagcagggctcggggaccaatagcagccgagagagcaatggaaccatggcagacctgggcaacattgcagacaatcctcaactgtccttctaccagctggtgtacgggctcaacgccctgctcctcatctgtgtgggggtctgctcctcagggattttcaccaaggtcacgaggaaggcatccacggccctgcacaacaagctcttcaacaaggttttccgctgccccatgagtttctttgacaccatcccaataggccggcttttgaactgcttcgcaggggacttggaacagctggaccagctcttgcccatcttttcagagcagttcctggtcctgtccttaatggtgatcgccgtcctgttgattgtcagtgtgctgtctccatatatcctgttaatgggagccataatcatggttatttgcttcatttattatatgatgttcaaggaggccatcggtgtgttcaagagactggagaactatagccggtctcctttattctcccacatcctcaattctctgcaaggcctgagctccatccatgtctatggaaaaactgaagacttcatcagccagtttaagaggctgactgatgcgcagaataactacctgctgttgtttctatcttccacacgatggatggcattgaggctggagatcatgaccaaccttgtgaccttggccgttgccctgttcgtggcttttggcatttcctccaccccctactcctttaaagtcatggctgtcaacatcgtgctgcagctggcgtccagcttccaggccactgcccggattggcttggagacagaggcacagttcacggctgtagagaggatactgcagtacatgaagatgtgtgtctcggaagctcctttacacatggaaggcacaagttgtccccaggggtggccacagcatggggaaatcatatttcaggattatcacatgaaatacagagacaacacacccaccgtgcttcacggcatcaacctgaccatccgcggccacgaagtggtgggcatcgtgggaaggacgggctctgggaagtcctccttgggcatggctctcttccgcctggtggagcccatggcaggccggattctcattgacggcgtggacatttgcagcatcggcctggaggacttgcggtccaagctctcagtgatccctcaagatccagtgctgctctcaggaaccatcagattcaacctagatccctttgaccgtcacaccgaccagcagatctgggatgccttggagaggacattcctgaccaaggccatctcaaagttccccaaaaagctgcatacagatgtggtggaaaacggtggaaacttctctgtgggggagaggcagctgctctgcattgccagggctgtgcttcgcaactccaagatcatccttatcgatgaagccacagcctccattgacatggagacagacaccctgatccagcgcacaatccgtgaagccttccagggctgcaccgtgctcgtcattgcccaccgtgtcaccactgtgctgaactgtgaccgcatcctggttatgggcaatgggaaggtggtagaatttgatcggccggaggtactgcggaagaagcctgggtcattgttcgcagccctcatggccacagccacttcttcactgagataaggagatgtggagacttcatggaggctggcagctgagctcagaggttcacacagctgcagcttcgaggcccacagtctgcgaccttcttgtttggagatgagaacttctcctggaagcaggggtaaatgtagggggggtggggattgctggatggaaaccctggaataggctacttgatggctctcaagaccttagaaccccagaaccatctaagacatgggattcagtgatcatgtggttctcc

SEQ ID NO: 50 - DNA, 2667 bp, Homo sapien
  Unsure 2039-2042: Unknown base
ggttgccacagctggtttagggccccgaccactggggccccttgtcaggaggagacagcctcccggcccggggaggacaagtcgctgccacctttggctgccgacgtgattccctgggacggtccgtttcctgccgtcagctgccggccgagttgggtctccgtgtttcaggccggctcccccttcctggtctcccttctcccgctgggccggtttatcgggaggagattgtcttccagggctagcaattggacttttgatgatgtttgacccagcggcaggaatagcaggcaacgtgatttcaaagctgggctcagcctctgtttcttctctcgtgtaatcgcaaaacccattttggagcaggaattccaatcatgtctgtgatggtggtgagaaagaaggtgacacggaaatgggagaaactcccaggcaggaacaccttttgctgtgatggccgcgtcatgatggcccggcaaaagggcattttctacctgacccttttcctcatcctggggacatgtacactcttcttcgcctttgagtgccgctacctggctgttcagctgtctcctgccatccctgtatttgctgccatgctcttccttttctccatggctacactgttgaggaccagcttcagtgaccctggagtgattcctcgggcgctaccagatgaagcagctttcatagaaatggagatagaagctaccaatggtgcggtgccccagggccagcgaccaccgcctcgtatcaagaatttccagataaacaaccagattgtgaaactgaaatactgttacacatgcaagatcttccggcctccccgggcctcccattgcagcatctgtgacaactgtgtggagcgcttcgaccatcactgcccctgggtggggaattgtgttggaaagaggaactaccgctacttctacctcttcatcctttctctctccctcctcacaatctatgtcttcgccttcaacatcgtctatgtggccctcaaatctttgaaaattggcttcttggagacattgaaagaaactcctggaactgttctagaagtcctcatttgcttctttacactctggtccgtcgtgggactgactggatttcatactttcctcgtggctctcaaccagacaaccaatgaagacatcaaaggatcatggacagggaagaatcgcgtccagaatccctacagccatggcaatattgtgaagaactgctgtgaagtgctgtgtggccccttgccccccagtgtgctggatcgaaggggtattttgccactggaggaaagtggaagtcgacctcccagtactcaagagaccagtagcagcctcttgccacagagcccagcccccacagaacacctgaactcaaatgagatgccggaggacagcagcactcccgaagagatgccacctccagagcccccagagccaccacaggaggcagctgaagctgagaagtagcctatctatggaagagacttttgtttgtgtttaattagggctatgagagatttcaggtgagaagttaaacctgagacagagagcaagtaagctgtcccttttaactgtttttctttggtctttagtcacccagttgcacactggcattttcttgctgcaagcttttttaaatttctgaactcaaggcagtggcagaagatgtcagtcacctctgataactggaaaaatgggtctcttgggccctggcactggttctccatggcctcagccacagggtccccttggaccccctctcttccctccagatcccagccctcctgcttggggtcactggtctcattctggggctaaaagtttttgagactggctcaaatcctcccaagctgctgcacgtgctgagtccagaggcagtcacagagacctctggccaggggatcctaactgggttcttggggtcttcaggactgaagaggagggagagtggggtcagaagattctcctggccaccaagtgccagcattgcccacaaatccttttaggaatgggacaggtaccttccacttgttgtannnnttgtttttccttttgactcctgctcccattaggagcaggaatggcagtaataaaagtctgcactttggtcatttcttttcctcagaggaagcccgagtgctcacttaaacactatcccctcagactccctgtgtgaggcctgcagaggccctgaatgcacaaatgggaaaccaaggcacagagaggctctcctctcctctcctctcccccgatgtaccctcaaaaaaaaaaaaatgctaaccagttcttccattaagcctcggctgagtgagggaaagcccagcactgctgccctctcgggtaactcaccctaaggcctcggcccacctctggctatggtaaccacactgggggcttcctccaagccccgctcttccagcacttccaccggcagagtcccagagccacttcaccctgggggtgggctgtggcccccagtcagctctgctcaggacctgctctatttcagggaagaagatttatgtattatatgtggctatatttcctagagcacctgtgttttcctctttctaagccagggtcctgtctggatgacttatgcggtgggggagtgtaaaccggaacttttcatctatttgaaggcgattaaactgtgtctaatgca

SEQ ID NO: 51 - DNA, 1819 bp, Homo sapien
gagccgccgccgcgcgcgcgccgcgcactgcagccccaggccccggccccccacccacgtctgcgttgctgccccgcctgggccaggccccaaaggcaaggacaaagcagctgtcagggaacctccgccggagtcgaatttacgtgcagctgccggcaaccacaggttccaagatggtttgcgggggcttcgcgtgttccaagaactgcctgtgcgccctcaacctgctttacaccttggttagtctgctgctaattggaattgctgcgtggggcattggcttcgggctgatttccagtctccgagtggtcggcgtggtcattgcagtgggcatcttcttgttcctgattgctttagtgggtctgattggagctgtaaaacatcatcaggtgttgctatttttttatatgattattctgttacttgtatttattgttcagttttctgtatcttgcgcttgtttagccctgaaccaggagcaacagggtcagcttctggaggttggttggaacaatacggcaagtgctcgaaatgacatccagagaaatctaaactgctgtgggttccgaagtgttaacccaaatgacacctgtctggctagctgtgttaaaagtgaccactcgtgctcgccatgtgctccaatcataggagaatatgctggagaggttttgagatttgttggtggcattggcctgttcttcagttttacagagatcctgggtgtttggctgacctacagatacaggaaccagaaagacccccgcgcgaatcctagtgcattcctttgatgagaaaacaaggaagatttcctttcgtattatgatcttgttcactttctgtaattttctgttaagctccatttgccagtttaaggaaggaaacactatctggaaaagtaccttattgatagtggaattatatatttttactctatgtttctctacatgtttttttctttccgttgctgaaaaatatttgaaacttgtggtctctgaagctcggtggcacctggaatttactgtattcattgtcgggcactgtccactgtggcctttcttagcatttttacctgcagaaaaactttgtatggtaccactgtgttggttatatggtgaatctgaacgtacatctcactggtataattatatgtagcactgtgctgtgtagatagttcctactggaaaaagagtggaaatttattaaaatcagaaagtatgagatcctgttatgttaagggaaatccaaattcccaattttttttggtctttttaggaaagattgttgtggtaaaaagtgttagtataaaaatgataatttacttgtagtcttttatgattacaccaatgtattctagaaatagttatgtcttaggaaattgtggtttaatttttgacttttacaggtaagtgcaaaggagaagtggtttcatgaaatgttctaatgtataataacatttaccttcagcctccatcagaatggaacgagttttgagtaatcaggaagtatatctatatgatcttgatattgttttataataatttgaagtctaaaagactgcatttttaaacaagttagtattaatgcgttggcccacgtagcaaaaagatatttgattatcttaaaaattgttaaataccgttttcatgaaatttctcagtattgtaacagcaacttgtcaaacctaagcatatttgaatatgatctcccataatttgaaattgaaatcgtattgtgtggctctgtatattctgttaaaaaattaaaggacagaaacctttctttgtgtatgcatgtttgaattaaaagaaagtaatggaag

SEQ ID NO: 52 - DNA, 2061 bp, Homo sapien
cagtcaccatgaagctgggctgtgtcctcatggcctgggccctctacctttcccttggtgtgctctgggtggcccagatgctactggctgccagttttgagacgctgcagtgtgagggacctgtctgcactgaggagagcagctgccacacggaggatgacttgactgatgcaagggaagctggcttccaggtcaaggcctacactttcagtgaacccttccacctgattgtgtcctatgactggctgatcctccaaggtccagccaagccagtttttgaaggggacctgctggttctgcgctgccaggcctggcaagactggccactgactcaggtgaccttctaccgagatggctcagctctgggtccccccgggcctaacagggaattctccatcaccgtggtacaaaaggcagacagcgggcactaccactgcagtggcatcttccagagccctggtcctgggatcccagaaacagcatctgttgtggctatcacagtccaagaactgtttccagcgccaattctcagagctgtaccctcagctgaaccccaagcaggaagccccatgaccctgagttgtcagacaaagttgcccctgcagaggtcagctgcccgcctcctcttctccttctacaaggatggaaggatagtgcaaagcagggggctctcctcagaattccagatccccacagcttcagaagatcactccgggtcatactggtgtgaggcagccactgaggacaaccaagtttggaaacagagcccccagctagagatcagagtgcagggtgcttccagctctgctgcacctcccacattgaatccagctcctcagaaatcagctgctccaggaactgctcctgaggaggcccctgggcctctgcctccgccgccaaccccatcttctgaggatccaggcttttcttctcctctggggatgccagatcctcatctgtatcaccagatgggccttcttctcaaacacatgcaggatgtgagagtcctcctcggtcacctgctcatggagttgagggaattatctggccaccagaagcctgggaccacaaaggctactgctgaatagaagtaaacagttcatccatgatctcacttaaccaccccaataaatctgattctttattttctcttcctgtcctgcacatatgcataagtacttttacaagttgtcccagtgttttgttagaataatgtagttaggtgagtgtaaataaatttatataaagtgagaattagagtttagctataattgtgtattctctcttaacacaacagaattctgctgtctagatcaggaatttctatctgttatatcgaccagaatgttgtgatttaaagagaactaatggaagtggattgaatacagcagtctcaactgggggcaattttgccccccagaggacattgggcaatgtttggagacattttggtcattatacttggggggttgggggatggtgggatgtgtgtctactggcatccagtaaatagaagccaggggtgccgctaaacatcctataatgcacagggcagtaccccacaacgaaaaataatctggcccaaaatgtcagttgtactgagtttgagaaaccccagcctaatgaaaccctaggtgttgggctctggaatgggactttgtcccttctaattattatctctttccagcctcattcagctattcttactgacataccagtctttagctggtgctatggtctgttctttagttctagtttgtatcccctcaaaagccattatgttgaaatcctaatccccaaggtgatggcattaagaagtgggcctttgggaagtgattagatcaggagtgcagagccctcatgattaggattagtgcccttatttaaaaaggccccagagagctaactcacccttccaccatatgaggacgtggcaagaagatgacatgtatgagaaccaaaaaacagctgtcgccaaacaccgactctgtcgttgccttgatcttgaacttccagcctccagaactatgagaaataaaattctggttgtttgtagcctaa

SEQ ID NO: 53 - DNA, 1312 bp, Homo sapien
caccatgcctggggggtgctcccggggccccgccgccggggacgggcgtctgcggctggcgcgactagcgctggtactcctgggctgggtctcctcgtcttctcccacctcctcggcatcctccttctcctcctcggcgccgttcctggcttccgccgtgtccgcccagcccccgctgccggaccagtgccccgcgctgtgcgagtgctccgaggcagcgcgcacagtcaagtgcgttaaccgcaatctgaccgaggtgcccacggacctgcccgcctacgtgcgcaacctcttccttaccggcaaccagctggccgtgctccctgccggcgccttcgcccgccggccgccgctggcggagctggccgcgctcaacctcagcggcagccgcctggacgaggtgcgcgcgggcgccttcgagcatctgcccagcctgcgccagctcgacctcagccacaacccactggccgacctcagtcccttcgctttctcgggcagcaatgccagcgtctcggcccccagtccccttgtggaactgatcctgaaccacatcgtgccccctgaagatgagcggcagaaccggagcttcgagggcatggtggtggcggccctgctggcgggccgtgcactgcaggggctccgccgcttggagctggccagcaaccacttcctttacctgccgcgggatgtgctggcccaactgcccagcctcaggcacctggacttaagtaataattcgctggtgagcctgacctacgtgtccttccgcaacctgacacatctagaaagcctccacctggaggacaatgccctcaaggtccttcacaatggcaccctggctgagttgcaaggtctaccccacattagggttttcctggacaacaatccctgggtctgcgactgccacatggcagacatggtgacctggctcaaggaaacagaggtagtgcagggcaaagaccggctcacctgtgcatatccggaaaaaatgaggaatcgggtcctcttggaactcaacagtgctgacctggactgtgacccgattcttcccccatccctgcaaacctcttatgtcttcctgggtattgttttagccctgataggcgctattttcctcctggttttgtatttgaaccgcaaggggataaaaaagtggatgcataacatcagagatgcctgcagggatcacatggaagggtatcattacagatatgaaatcaatgcggaccccagattaacaaacctcagttctaactcggatgtctgagaaatattagaggacagaccaaggacaactctgcatgagatgtag

SEQ ID NO: 54 - DNA, 1528 bp, Homo sapien
cggcgagcgagcaccttcgacgcggtccggggaccccctcgtcgctgtcctcccgacgcggacccgcgtgccccaggcctcgcgctgcccggccggctcctcgtgtcccactcccggcgcacgccctcccgcgagtcccgggcccctcccgcgcccctcttctcggcgcgcgcgcagcatggcgcccccgcaggtcctcgcgttcgggcttctgcttgccgcggcgacggcgacttttgccgcagctcaggaagaatgtgtctgtgaaaactacaagctggccgtaaactgctttgtgaataataatcgtcaatgccagtgtacttcagttggtgcacaaaatactgtcatttgctcaaagctggctgccaaatgtttggtgatgaaggcagaaatgaatggctcaaaacttgggagaagagcaaaacctgaaggggccctccagaacaatgatgggctttatgatcctgactgcgatgagagcgggctctttaaggccaagcagtgcaacggcacctccacgtgctggtgtgtgaacactgctggggtcagaagaacagacaaggacactgaaataacctgctctgagcgagtgagaacctactggatcatcattgaactaaaacacaaagcaagagaaaaaccttatgatagtaaaagtttgcggactgcacttcagaaggagatcacaacgcgttatcaactggatccaaaatttatcacgagtattttgtatgagaataatgttatcactattgatctggttcaaaattcttctcaaaaaactcagaatgatgtggacatagctgatgtggcttattattttgaaaaagatgttaaaggtgaatccttgtttcattctaagaaaatggacctgacagtaaatggggaacaactggatctggatcctggtcaaactttaatttattatgttgatgaaaaagcacctgaattctcaatgcagggtctaaaagctggtgttattgctgttattgtggttgtggtgatagcagttgttgctggaattgttgtgctggttatttccagaaagaagagaatggcaaagtatgagaaggctgagataaaggagatgggtgagatgcatagggaactcaatgcataactatataatttgaagattatagaagaagggaaatagcaaatggacacaaattacaaatgtgtgtgcgtgggacgaagacatctttgaaggtcatgagtttgttagtttaacatcatatatttgtaatagtgaaacctgtactcaaaatataagcagcttgaaactggctttaccaatcttgaaatttgaccacaagtgtcttatatatgcagatctaatgtaaaatccagaacttggactccatcgttaaaattatttatgtgtaacattcaaatgtgtgcattaaatatgcttccacagtaaaatctgaaaaactgatttgtgattgaaagctgcctttctatttacttgagtcttgtacatacatacttttttatgagctatgaaataaaacattttaaactg

SEQ ID NO: 55 - DNA, 4725 bp, Homo sapien
caattcggcctcgctccttgtgattgcgctaaaccttccgtcctcagctgagaacgctccaccacctccccggatcgctcatctcttggctgccctcccactgttcctgatgttattttactccccgtatcccctactcgttcttcacaattctgtaggtgagtggttccagctggtgcctggcctgtgtctcttggatgccctgtggcttcagtccgtctcctgttgcccaccacctcgtccctgggccgcctgataccccagcccaacagctaaggtgtggatggacagtagggggctggcttctctcactggtcaggggtcttctcccctgtctgcctcccggagctaggactgcagaggggcctatcatggtgcttgcaggccccctggctgtctcgctgttgctgcccagcctcacactgctggtgtcccacctctccagctcccaggatgtctccagtgagcccagcagtgagcagcagctgtgcgcccttagcaagcaccccaccgtggcctttgaagacctgcagccgtgggtctctaacttcacctaccctggagcccgggatttctcccagctggctttggacccctccgggaaccagctcatcgtgggagccaggaactacctcttcagactcagccttgccaatgtctctcttcttcaggccacagagtgggcctccagtgaggacacgcgccgctcctgccaaagcaaagggaagactgaggaggagtgtcagaactacgtgcgagtcctgatcgtcgccggccggaaggtgttcatgtgtggaaccaatgccttttcccccatgtgcaccagcagacaggtggggaacctcagccggactattgagaagatcaatggtgtggcccgctgcccctatgacccacgccacaactccacagctgtcatctcctcccagggggagctctatgcagccacggtcatcgacttctcaggtcgggaccctgccatctaccgcagcctgggcagtgggccaccgcttcgcactgcccaatataactccaagtggcttaatgagccaaacttcgtggcagcctatgatattgggctgtttgcatacttcttcctgcgggagaacgcagtggagcacgactgtggacgcaccgtgtactctcgcgtggcccgcgtgtgcaagaatgacgtggggggccgattcctgctggaggacacatggaccacattcatgaaggcccggctcaactgctcccgcccgggcgaggtccccttctactataacgagctgcagagtgccttccacttgccggagcaggacctcatctatggagttttcacaaccaacgtaaacagcatcgcggcttctgctgtctgcgccttcaacctcagtgctatctcccaggctttcaatggcccatttcgctaccaggagaaccccagggctgcctggctccccatagccaaccccatccccaatttccagtgtggcaccctgcctgagaccggtcccaacgagaacctgacggagcgcagcctgcaggacgcgcagcgcctcttcctgatgagcgaggccgtgcagccggtgacacccgagccctgtgtcacccaggacagcgtgcgcttctcacacctcgtggtggacctggtgcaggctaaagacacgctctaccatgtactctacattggcaccgagtcgggcaccatcctgaaggcgctgtccacggcgagccgcagcctccacggctgctacctggaggagctgcacgtgctgccccccgggcgccgcgagcccctgcgcagcctgcgcatcctgcacagcgcccgcgcgctcttcgtggggctgagagacggcgtcctgcgggtcccactggagaggtgcgccgcctaccgcagccagggggcatgcctgggggcccgggacccgtactgtggctgggacgggaagcagcaacgttgcagcacactcgaggacagctccaacatgagcctctggacccagaacatcaccgcctgtcctgtgcggaatgtgacacgggatgggggcttcggcccatggtcaccatggcaaccatgtgagcacttggatggggacaactcaggctcttgcctgtgtcgagctcgatcctgtgattcccctcgaccccgctgtgggggccttgactgcctggggccagccatccacatcgccaactgctccaggaatggggcgtggaccccgtggtcatcgtgggcgctgtgcagcacgtcctgtggcatcggcttccaggtccgccagcgaagttgcagcaaccctgctccccgccacgggggccgcatcttcgtgggcaagagccgggaggaacggttctgtaatgagaacacgccttgcccggtgcccatcttctgggcttcctggggctcctggagcaagtgcagcagcaactgtggagggggcatgcagtcgcggcgtcgggcctgcgagaacggcaactcctgcctgggctgcggcgagttcaagacgtgcaaccccgagggctgccccgaagtgcggcgcaacaccccctggacgccgtggctgcccgtgaacgtgacgcagggcggggcacggcaggagcagcggttccgcttcacctgccgcgcgccccttgcagacccgcacggcctgcagttcggcaggagaaggaccgagacgaggacctgtcccgcggacggctccggctcctgcgacaccgacgccctggtggaggtcctcctgcgcagcgggagcacctccccgcacacggtgagcgggggctgggccgcctggggcccgtggtcgtcctgctcccgggactgcgagctgggcttccgcgtccgcaagagaacgtgcactaacccggagccccgcaacgggggcctgccctgcgtgggcgatgctgccgagtaccaggactgcaacccccaggcttgcccagttcggggtgcttggtcctgctggacctcatggtctccatgctcagcttcctgtggtgggggtcactatcaacgcacccgttcctgcaccagccccgcaccctccccaggtgaggacatctgtctcgggctgcacacggaggaggcactatgtgccacacaggcctgcccaggctggtcgccctggtctgagtggagtaagtgcactgacgacggagcccagagccgaagccggcactgtgaggagctcctcccagggtccagcgcctgtgctggaaacagcagccagagccgcccctgcccctacagcgagattcccgtcatcctgccagcctccagcatggaggaggccaccgactgtgcaggtaaaagaaaccggacctacctcatgctgcggtcctcccagccctccagcaccccactccaaagtctggactctttccacatcctgctccagacagccaagctttgttggggtccccactgctttgagatgggttcaatctcatccacttggtggccacgggcatctcctgcttcttgggctctgggctcctgaccctagcagtgtacctgtcttgccagcactgccagcgtcagtcccaggagtccacactggtccatcctgccacccccaaccatttgcactacaagggcggaggcaccccgaagaatgaaaagtacacacccatggaattcaagaccctgaacaagaataacttgatccctgatgacagagccaacttctacccattgcagcagaccaatgtgtacacgactacttactacccaagccccctgaacaaacacagcttccggcccgaggcctcacctggacaacggtgcttccccaacagctgataccgccgtcctggggacttgggcttcttgccttcataaggcacagagcagatggagatgggacagtggagccagtttggttttctccctctgcactaggccaagaacttgctgccttgcctgtggggggtcccatccggcttcagagagctctggctggcattgaccatgggggaaagggctggtttcaggctgacatatggccgcaggtccagttcagcccaggtctctcatggttatcttccaacccactgtcacgctgacactatgctgccatgcctgggctgtggacctactgggcatttgaggaattggagaatggagatggcaagagggcaggcttttaagtttgggttggagacaacttcctgtggcccccacaagctgagtctggccttctccagctggccccaaaaaaggcctttgctacatcctgattatctctgaaagtaatcaatcaagtggctccagtagctctggattttctgccagggctgggccattgtggtgctgccccagtatgacatgggaccaaggccagcgcaggttatccacctctgcctggaagtctatactctacccagggcatccctctggtcagaggcagtgagtactgggaactggaggctgacctgtgcttagaagtcctttaatctgggctggtacaggcctcagccttgccctcaatgcacgaaaggtggcccaggagagaggatcaatgccataggaggcagaagtctggcctctgtgcctctatggagactatcttccagttgctgctcaacagagttgttggctgagacctgcttgggagtctctgctggcccttcatctgttcaggaacacacacacacacacactcacacacgcacacacaatcacaatttgctacagcaacaaaaaagacattgggctgtggcattattaattaaagatgatatccagtc

SEQ ID NO: 56 - DNA, 2018 bp, Homo sapien
cgcagaaagaggaggcgcttgccttcagcttgtgggaaatcccgaagatggccaaagacaactcaactgttcgttgcttccagggcctgctgatttttggaaatgtgattattggttgttgcggcattgccctgactgcggagtgcatcttctttgtatctgaccaacacagcctctacccactgcttgaagccaccgacaacgatgacatctatggggctgcctggatcggcatatttgtgggcatctgcctcttctgcctgtctgttctaggcattgtaggcatcatgaagtccagcaggaaaattcttctggcgtatttcattctgatgtttatagtatatgcctttgaagtggcatcttgtatcacagcagcaacacaacaagactttttcacacccaacctcttcctgaagcagatgctagagaggtaccaaaacaacagccctccaaacaatgatgaccagtggaaaaacaatggagtcaccaaaacctgggacaggctcatgctccaggacaattgctgtggcgtaaatggtccatcagactggcaaaaatacacatctgccttccggactgagaataatgatgctgactatccctggcctcgtcaatgctgtgttatgaacaatcttaaagaacctctcaacctggaggcttgtaaactaggcgtgcctggtttttatcacaatcagggctgctatgaactgatctctggtccaatgaaccgacacgcctggggggttgcctggtttggatttgccattctctgctggactttttgggttctcctgggtaccatgttctactggagcagaattgaatattaagcataaagtgttgccaccatacctccttccccgagtgactctggatttggtgctggaaccagctctctcctaatattccacgtttgtgccccacactaacgtgtgtgtcttacattgccaagtcagatggtacggacttcctttaggatctcaggcttctgcagttctcatgactcctacttttcatcctagtctagcattctgcaacatttatatagactgttgaaaggagaatttgaaaaatgcataataactacttccatccctgcttatttttaatttgggaaaataaatacattcgaaggaacctgtgttatcacagtaacccagagctgtatttggctagcaatctgcctgtatctctcactattatctaaaagaaaccttccaatgcttctgttgatctcagtattgtcaggggaacagagaagttgggaaaagattactgaaatataccttttgcatttctttctagagtagctcccatatatggagatgggtgattctcttgatgccaccttcagatccttttattctccagaataattcttaacagtggttcaaatttcctttcataccttgaagtatgtgtttagtagcctcaattctccattaattaaaagtgtgggctgggcgtgggggctcatgcctgtaatcccagcactttgggaggccgaggtgggcagatcacctgaggtcaggagttcaagaccagcctggccaacatggtgaaaccccgtctctacaaaaatacaaaaattagccaggcgtgatggcaggtgcctgtaatcctagctacttggcaggctaacgcaggagaatcacttgaccgggagacagaggttgcagtgagctgagatcgtacctattgcactccatcctggatgaaagagccagactctgtctcaaaacaaacaaaaaagcgtggggacttctggggacagacaaggtgcctgttatatatttactcagtctttgccctgaatggtctcagcttgagaccatttcaaactggagagaagcaagccagccaatagaatggggtgatttacagggatttctgtttactgtcaaaatatttctcatctgcactatgtttccatttgtggtcctgaaggaaattcttataactcaacatttgtctggtcttataagtaaagacagctttaaaatctgttcactttcaaa

SEQ ID NO: 57 - DNA, 1043 bp, Homo sapien
cccggcccgggctcgagaatcaagggcctcggccgccgtcccgcagctcagtccatcgcccttgccgggcagcccgggcagagaccatgtttgacaagacgcggctgccgtacgtggccctcgatgtgctctgcgtgttgctggctggattgccttttgcaatttttacttcaaggcatattacttcaaggcatacccccttccaacgaggagtattctgtaatgatgagtccatcaagtacccttacaaagaagacaccataccttatgcgttattaggtggaataatcattccattcagtattatcgttattattcttggagaaaccctgtctgtttactgtaaccttttgcactcaaattcctttatcaggaataactacatagccactatttacaaagccattggaacctttttatttggtgcagctgctagtcagtccctgactgacattgccaagtattcaataggcagactgcggcctcacttcttggatgtttgtgatccagattggtcaaaaatcaactgcagcgatggttacattgaatactacatatgtcgagggaatgcagaaagagttaaggaaggcaggttgtccttctattcaggccactcttcgttttccatgtactgcatgctgtttgtggcactttatcttcaagccaggatgaagggagactgggcaagactcttacgccccacactgcaatttggtcttgttgccgtatccatttatgtgggcctttctcgagtttctgattataaacaccactggagcgatgtgttgactggactcattcagggagctctggttgcaatattagttgctgtatatgtatcggatttcttcaaagaaagaacttcttttaaagaaagaaaagaggaggactctcatacaactctgcatgaaacaccaacaactgggaatcactatccgagcaatcaccagccttgaaaggcagcagggtgcccaggtgaagctggcctgttttctaaaggaaaatgattgccacaaggcaagaggatgcatctttcttcctgg

SEQ ID NO: 58 - DNA, 2970 bp, Homo sapien
agtgaaggggtttcccatatgaaaaatacagaaagaattatttgaatactagcaaatacacaacttgatatttctagagaacccaggcacagtcttggagacattactcctgagagactgcagctgatggaagatgagccccaacttctaaaaatgtatcactaccgggattgagatacaaacagcatttaggaaggtctcatctgagtagcagcttcctgccctccttcttggagataagtcgggcttttggtgagacagactttcccaaccctctgcccggccggtgcccatgcttctgtggctgctgctgctgatcctgactcctggaagagaacaatcaggggtggccccaaaagctgtacttctcctcaatcctccatggtccacagccttcaaaggagaaaaagtggctctcatatgcagcagcatatcacattccctagcccagggagacacatattggtatcacgatgagaagttgttgaaaataaaacatgacaagatccaaattacagagcctggaaattaccaatgtaagacccgaggatcctccctcagtgatgccgtgcatgtggaattttcacctgactggctgatcctgcaggctttacatcctgtctttgaaggagacaatgtcattctgagatgtcaggggaaagacaacaaaaacactcatcaaaaggtttactacaaggatggaaaacagcttcctaatagttataatttagagaagatcacagtgaattcagtctccagggataatagcaaatatcattgtactgcttataggaagttttacatacttgacattgaagtaacttcaaaacccctaaatatccaagttcaagagctgtttctacatcctgtgctgagagccagctcttccacgcccatagaggggagtcccatgaccctgacctgtgagacccagctctctccacagaggccagatgtccagctgcaattctccctcttcagagatagccagaccctcggattgggctggagcaggtcccccagactccagatccctgccatgtggactgaagactcagggtcttactggtgtgaggtggagacagtgactcacagcatcaaaaaaaggagcctgagatctcagatacgtgtacagagagtccctgtgtctaatgtgaatctagagatccggcccaccggagggcagctgattgaaggagaaaatatggtccttatttgctcagtagcccagggttcagggactgtcacattctcctggcacaaagaaggaagagtaagaagcctgggtagaaagacccagcgttccctgttggcagagctgcatgttctcaccgtgaaggagagtgatgcagggagatactactgtgcagctgataacgttcacagccccatcctcagcacgtggattcgagtcaccgtgagaattccggtatctcaccctgtcctcaccttcagggctcccagggcccacactgtggtgggggacctgctggagcttcactgtgagtccctgagaggctctcccccgatcctgtaccgattttatcatgaggatgtcaccctggggaacagctcagccccctctggaggaggagcctccttcaacctctctctgactgcagaacattctggaaactactcctgtgatgcagacaatggcctgggggcccagcacagtcatggagtgagtctcagggtcacagttccggtgtctcgccccgtcctcaccctcagggctcccggggcccaggctgtggtgggggacctgctggagcttcactgtgagtccctgagaggctccttcccgatcctgtactggttttatcacgaggatgacaccttggggaacatctcggcccactctggaggaggggcatccttcaacctctctctgactacagaacattctggaaactactcatgtgaggctgacaatggcctgggggcccagcacagtaaagtggtgacactcaatgttacaggaacttccaggaacagaacaggccttaccgctgcgggaatcacggggctggtgctcagcatcctcgtccttgctgctgctgctgctctgctgcattacgccagggcccgaaggaaaccaggaggactttctgccactggaacatctagtcacagtcctagtgagtgtcaggagccttcctcgtccaggccttccaggatagaccctcaagagcccactcactctaaaccactagccccaatggagctggagccaatgtacagcaatgtaaatcctggagatagcaacccgatttattcccagatctggagcatccagcatacaaaagaaaactcagctaattgtccaatgatgcatcaagagcatgaggaacttacagtcctctattcagaactgaagaagacacacccagacgactctgcaggggaggctagcagcagaggcagggcccatgaagaagatgatgaagaaaactatgagaatgtaccacgtgtattactggcctcagaccactagccccttacccagagtggcccacaggaaacagcctgcaccatttttttttctgttctctccaaccacacatcatccatctctccagactctgcctcctacgaggctgggctgcagggtatgtgaggctgagcaaaaggtctgcaaatctcccctgtgcctgatctgtgtgttccccaggaagagagcaggcagcctctgagcaagcactgtgttattttcacagtggagacacgtggcaaggcaggagggccctcagctcctagggctgtcgaatagaggaggagagagaaatggtctagccagggttacaagggcacaatcatgaccatttgatccaagtgtgatcgaaagctgttaatgtgctctctgtataaacaatttgctccaaatattttgtttcccttttttgtgtggctggtagtggcattgctgatgttttggtgtatatgctgtatccttgctaccatattggg

SEQ ID NO: 59 - DNA, 2732 bp, Homo sapien
ggagccgcgccgcatctcaggcgcagtctctaggggctgtgcgcatcctagggggggacatgtgcatctcaggggggctgctcgcatctggggggtgctgtgtgcatctcgggggggctgttgcatctacgcggggtggctgtgtccgcatctggagggggctgtgcgcaacccggggggggtgttgcgcgcatctagcaggggcggctgtgcgcatttcgggggggggctgtgcatatctggggggacacgtgcttatctctgggggcggctgtgcgcatcttgaggggtgtgtacatctcggggggcctgtgcatcttggggggctgtgtgcatccgcgggggctgtgcgcatctcggggtgctgtgcgctgctcctctgagctctgctctttcttgcagcgtttgcctcagccatggagggcggggccgcggcagccacccccacagcactgccttactacgtggccttctcccagctgctgggcctgaccttggtggccatgaccggcgcgtggctcgggctgtaccgaggcggcattgcctgggagagcgacctgcagttcaacgcgcaccccctctgcatggtcataggcctgatcttcctgcagggaaatgccctgctggtttaccgtgtcttcaggaacgaagctaaacgcaccaccaaggtcctgcacgggctgctgcacatctttgcgctcgtcatcgccctggttggcttggtggcggtgttcgactaccacaggaagaagggctacgctgacctgtacagcctacacagctggtgcgggatccttgtctttgtcctgtactttgtgcagtggctggtgggcttcagcttcttcctgttccccggagcttcattctccctgcggagccgctaccgcccacagcacatcttctttggtgctaccatcttcctccttcccgtgggcaccgccctgctgggcctgaaggaggcactgctgttcaacctcgggggcaagtatagcgcatttgagcccgagggtgtcctggccaacgtgctgggcctgctgctggcctgcttcggtggggcggtgctctacatcttgacccgggccgactggaagcggccttcccaggcggaagagcaggccctctccatggacttcaagacgctgaggcagggagatagccccggctcccagtgatgcgcccggccggccctgggggttcgcggggtgtcttcttgcctgcccctgctgaggcgtcttcaggactgcaggctccggagagtggctctggcagcaggcgggcgcgtgggtgcagggggatccgtttgatgcgtcgtttctggggcaggtctccgcctcctctgcttctcgtttctccgctgctatagaccagttcattgtgtgtggctcccgtgtctctgttgcccccttcagtgcagaaggctttgggtagacttcgggtgttcggtcctggtcgcagagcacagatctttaaagaagcgttagagaggtaggttctaccctcttggtagtagatgcctggggcaaggcccaggggaaactgggggggcctcagggacaggcctggaaaggccacgatggcctgctgaattcaaacaaggagtccctccagcctgaataacacgtggcacaaatgggcccggcctttggcagaggagcaagtgatatgatgtgtaaagtatgttggtggtgaaagcaaggttccccaggagaggggagggactggcccctgggaagctgtgagatgaggctgtggcccagctgtagtcctgaccttactcttctttaaaaccctttagccctaggatggctttggtgggagaggggatagaagcccatgacttcagacagactttctcttggcagatgcaggcaggcctcctcccaggctgctccagacatgggggttggggatggggggtaccttgcagccccttcctgctggggctccctccttgtagcacccccttgcggctcagctctggtttcctctcccaggctcacccaggctctgctcaggctgggaggcagagggcacaaaccttataattttttaaatgaaaaaccgctgctgctggctgtggctagagccccctggggctgctggagctgctgcctctgttctggaggacgagccttctccttatctgctgcccatctttccaggaagtcaggatggagtcagacaactaacgatcatcccccgtgggtgtctgcacatcactccagccccataaagagtgtcatgttagctgagtcaccatttggcttcggcctggaaatagtgtgttagaacactgatcgtgtgcgaggccaggagatcaagaccatcctgactaacaaacacagtgaaaccccgtctctactaaaaatacaaaaaaattagccaggcgtggtggtgggcgcctgtagtcccagctacttgggagacaggtctctacggaattccctgtattagtctatatggttctccaagaaactgaatgaatccattggagaagcggtggataactagccacgacaaaatttgagaatacataaacaacgcattccgcaggaaacatacagaggatgccttttctgtgattgggtgggattttttccctttttatgtggatatagtagttacttgtgacaagaataattttggaataatttctattaatatcaactctgaagctaattgtacataatctcgagattgtgtttgttcataataaaagtgaagtgaatgtg

SEQ ID NO: 60 - DNA, 2165 bp, Homo sapien
cgccaccgctgggtgcggcgaggccggcgcgatgcggcagctgtgccggggccgcgtgctgggcatctcggtggccatcgcgcacggggtcttctcgggctccctcaacatcttgctcaagttcctcatcagccgctaccagttctccttcctgaccctggtgcagtgcctgaccagctccaccgcggcgctgagcctggagctgctgcggcgcctcgggctcatcgccgtgccccccttcggtctgagcctggcgcgctccttcgcgggggtcgcggtgctctccacgctgcagtccagcctcacgctctggtccctgcgcggcctcagcctgcccatgtacgtggtcttcaagcgctgcctgcccctggtcaccatgctcatcggcgtcctggtgctcaagaacggcgcgccctcgccaggggtgctggcggcggtgctcatcaccacctgcggcgccgccctggcaggagccggcgacctgacgggcgaccccatcgggtacgtcacgggagtgctggcggtgctggtgcacgctgcctacctggtgctcatccagaaggccagcgcagacaccgagcacgggccgctcaccgcgcagtacgtcatcgccgtctctgccaccccgctgctggtcatctgctccttcgccagcaccgactccatccacgcctggaccttcccgggctggaaggacccggccatggtctgcatcttcgtggcctgcatcctgatcggctgcgccatgaacttcaccacgctgcactgcacctacatcaattcggccgtgaccacctctctgttcattgccggcgtggtggtgaacaccctgggctctatcatttactgtgtggccaagttcatggagaccagaaagcaaagcaactacgaggacctggaggcccagcctcggggagaggaggcgcagctaagtggagaccagctgccgttcgtgatggaggagctgcccggggagggaggaaatggccggtcagaaggtggggaggcagcaggtggccccgctcaggagagcaggcaagaggtcaggggcagcccccgaggagtcccgctggtggctgggagctctgaagaagggagcaggaggtcgttaaaagatgcttacctcgaggtatggaggttggttaggggaaccaggtatatgaagaaggattatttgatagaaaacgaggagttacccagtccttgagaaggaggtgcatgtacgtacctatgtgcatacacttattttatatgttagaaatgacgtgttttaatgagaggcctccccgttttattctttgaggagtggggaagggaagaaaagaaagaagctgaaaggtactgacacagagcaacaaaattagcacctgtgtgaattatttagtgtgacttcacctgaggcatcacagagacaaaagaatgtgaagctacttaacaaagtaaggcaacgtttctgcttcagactcctggcacatttactttttgtcattataaccataactaaatatctgcatgtaccaagagtccctaagccaccccctccaaagatggagtgtagaaatgatgacagcacttagtaagttcaaagatgacattcagggatgcattttttgatgatagaactacagtttttatcgccagctgggcaaagagtatattgctgaaatgatatataaatatattgaattgatgtttactgtttatagtcatctgaaatatcatatttactctgattctactcacttgttttttaaaaataagtgtcctactattgtattatatattgatagaaactgttaaagctattttgaaaatatgagttcttagctttaatcatgaagtctgaagtttgctttcagtaattattttaaaagttgttttggttcattgctttataatatttattattgaatgccaaacctgttcttttttttactgtgtccaatattctttcaagcaaatgcaatggctggaatataattcagaattaactgaaacccagccagaagagggaccacctgtaaagcaagtcctttcaagtttcactgcacatcccaaaccatgttacaaaaagagcaactgctatattcacattatgatatttttctatcttaaatttgtcaaaataaagtatgagtctaactattaaaaaaaaaaaaaaaaaa

SEQ ID NO: 61 - DNA, 424 bp, Homo sapien
atttctccaggagaactccacacttgcacaatatcttctccaaggacagaagagggacaatatttgtccttcctactggattttgaaaccctttgcactgagtgtagactgtagttctgtgacataccatgaagagtgtgtgtgtgttttaagggagctactgtcttacccaaaacctgtgaatataaagtgttttttcatgaattgctcattattcagccagtcgttaatgaattcattcaacaagtgtctctgagatgctagacactggggattaaaagaggaacaacagagacaagatctctgccctccagaaactgacagtctattgaatgagacagttgtctaacaatcacaatcaagtgtgatcaatctctggtgacaggactctaacctagaggcatgtgcctaatctggggtgact

SEQ ID NO: 62 - DNA, 1270 bp, Homo sapien
caggggacaggctgcagccggtgcagttacacgttttcctccaaggagcctcggacgttgtcacgggtttggggtcggggacagagcagtgaccatggccaggctggcgttgtctcctgtgcccagccactggatggtggcgttgctgctgctgctctcagctgagccagtaccagcagccagatcggaggaccggtaccggaatcccaaaggtagtgcttgttcgcggatctggcagagcccacgtttcatagccaggaaacggggcttcacggtgaaaatgcactgctacatgaacagcgcctccggcaatgtgagctggctctggaagcaggagatggacgagaatccccagcagctgaagctggaaaagggccgcatggaagagtcccagaacgaatctctcgccaccctcaccatccaaggcatccggtttgaggacaatggcatctacttctgtcagcagaagtgcaacaacacctcggaggtctaccagggctgcggcacagagctgcgagtcatgggattcagcaccttggcacagctgaagcagaggaacacgctgaaggatggtatcatcatgatccagacgctgctgatcatcctcttcatcatcgtgcctatcttcctgctgctggacaaggatgacagcaaggctggcatggaggaagatcacacctacgagggcctggacattgaccagacagccacctatgaggacatagtgacgctgcggacaggggaagtgaagtggtctgtaggtgagcacccaggccaggagtgagagccaggtcgccccatgacctgggtgcaggctccctggcctcagtgactgcttcggagctgcctggctcatggcccaacccctttcctggaccccccagctggcctctgaagctggcccaccagagctgccatttgtctccagcccctggtccccagctcttgccaaagggcctggagtagaaggacaacagggcagcaacttggagggagttctctggggatggacgggacccagccttctgggggtgctatgaggtgatccgtccccacacatgggatgggggaggcagagactggtccagagcccgcaaatggactcggagccgagggcctcccagcagagcttgggaagggccatggacccaactgggccccagaagagccacaggaacatcattcctctcccgcaaccactcccaccccagggaggccctggcctccagtgccttcccccgtggaataaacggtgtgtcctgagaaacca

SEQ ID NO: 63 - DNA, 2549 bp, Homo sapien
atgggcctccccgagccgggccctctccggcttctggcgctgctgctgctgctgctgctgctgctgctgctgcggctccagcatcttgcggcggcagcggctgatccgctgctcggcggccaagggccggccaaggagtgcgaaaaggaccaattccagtgccggaacgagcgctgcatcccctctgtgtggagatgcgacgaggacgatgactgcttagaccacagcgacgaggacgactgccccaagaagacctgtgcagacagtgacttcacctgtgacaacggccactgcatccacgaacggtggaagtgtgacggcgaggaggagtgtcctgatggctccgatgagtccgaggccacttgcaccaagcaggtgtgtcctgcagagaagctgagctgtggacccaccagccacaagtgtgtacctgcctcgtggcgctgcgacggggagaaggactgcgagggtggagcggatgaggccggctgtgctacctcactgggcacctgccgtggggacgagttccagtgtggggatgggacatgtgtccttgcaatcaagcactgcaaccaggagcaggactgtccagatgggagtgatgaagctggctgcctacaggggctgaacgagtgtctgcacaacaatggcggctgctcacacatctgcactgacctcaagattggctttgaatgcacgtgcccagcaggcttccagctcctggaccagaagacttgtggcgacattgatgagtgcaaggacccagatgcctgcagccagatctgtgtcaattacaagggctattttaagtgtgagtgctaccctggctgcgagatggacctactgaccaagaactgcaaggctgctgctggcaagagcccatccctaatcttcaccaaccgcacgagtgcggaggatcgacctgtgaagcggaactattcacgcctcatccccatgctcaagaatgtcgtggcactagatgtggaagttgccaccaatcgcatctactggtgtgacctctcctaccgtaagatctatagcgcctacatggacaaggccagtgacccgaaagagcgggaggtcctcattgacgagcagttgcactctccagagggcctggcagtggactgggtccacaagcacatctactggactgactcgggcaataagaccatctcagtggccacagttgatggtggccgccgacgcactctcttcagccgtaacctcagtgaaccccgggccatcgctgttgaccccctgcgagggttcatgtattggtctgactggggggaccaggccaagattgagaaatctgggctcaacggtgtggaccggcaaacactggtgtcagacaatattgaatggcccaacggaatcaccctggatctgctgagccagcgcttgtactgggtagactccaagctacaccaactgtccagcattgacttcagtggaggcaacagaaagacgctgatctcctccactgacttcctgagccacccttttgggatagctgtgtttgaggacaaggtgttctggacagacctggagaacgaggccattttcagtgcaaatcggctcaatggcctggaaatctccatcctggctgagaacctcaacaacccacatgacattgtcatcttccatgagctgaagcagccaagagctccagatgcctgtgagctgagtgtccagcctaatggaggctgtgaatacctgtgccttcctgctcctcagatctccagccactctcccaagtacacatgtgcctgtcctgacacaatgtggctgggtccagacatgaagaggtgctaccgagatgcaaatgaagacagtaagatgggctcaacagtcactgccgctgttatcgggatcatcgtgcccatagtggtgatagccctcctgtgcatgagtggatacctgatctggagaaactggaagcggaagaacaccaaaagcatgaattttgacaacccagtctacaggaaaacaacagaagaagaagatgaagatgagctccatatagggagaactgctcagattggccatgtctatcctgcacgagtggcattaagccttgaagatgatggactaccctgaggatgggatcacccccttcgtgcctcatggaattcagtcccatgcactacactccggatggtgtatgactggatgaatgggtttctatatatgggtctgtgtgagtgtatgtgtgtgtgtgatttttttttttaaatttatgttgcggaaaggtaaccacaaagttatgatgaactgcaaacatccaaaggatgtgagagtttttctatgtataatgttttatacactttttaactggttgcactacccatgaggaattcgtggaatggctactgctgactaacatgatgcacataaccaaatgggggccaatggcacagtaccttactcatcatttaaaaactatatttacagaagatgtttggttgctggggggcttttttaggttttgggcatttgttttttgtaaataagatgattatgctttgtggctatccatcaacataagt

SEQ ID NO: 64 - DNA, 1059 bp, Homo sapien
ccgttccgcgctctggcggctcctcccgggcgatgcctccgctctgggccctgctggccctcggctgcctgcggttcggctcggctgtgaacctgcagccccaactggccagtgtgactttcgccaccaacaaccccacacttaccactgtggccttggaaaagcctctctgcatgtttgacagcaaagaggccctcactggcacccacgaggtctacctgtatgtcctggtcgactcagccatttccaggaatgcctcagtgcaagacagcaccaacaccccactgggctcaacgttcctacaaacagagggtgggaggacaggtccctacaaagctgtggcctttgacctgatcccctgcagtgacctgcccagcctggatgccattggggatgtgtccaaggcctcacagatcctgaatgcctacctggtcagggtgggtgccaacgggacctgcctgtgggatcccaacttccagggcctctgtaacgcacccctgtcggcagccacggagtacaggttcaagtatgtcctggtcaatatgtccacgggcttggtagaggaccagaccctgtggtcggaccccatccgcaccaaccagctcaccccatactcgacgatcgacacgtggccaggccggcggagcggaggcatgatcgtcatcacttccatcctgggctccctgcccttctttctacttgtgggttttgctggcgccattgccctcagcctcgtggacatggggagttctgatggggaaacgactcacgactcccaaatcactcaggaggctgttcccaagtcgctgggggcctcggagtcttcctacacgtccgtgaaccgggggccgccactggacagggctgaggtgtattccagcaagctccaagactgagcccagcaccacccctgggcagcagcatcctcctctctggccttgccccaggccctgcagcggtggttgtcacaccctgacttcagggaaggtgaaacagggcttgtccctccaactgcaggaaaacccttaataaaatcttctgatgagttctaaaaaaaaa

SEQ ID NO: 65 - DNA, 1475 bp, Homo sapien
  Unsure 1391, 1399, 1418, 1421, 1431, 1446, 1449, 1456, 1463, 1469: Unknown base
tctctgaccaccggtgcatgcagcccctgtcacataccgcctgcttgctcaaatcaatcatgaccctttcatgtgaaatctttagtattgtgagcccttaaaagggacggaaattgtgcatacgtggagctcggattttaaggcagtagctgcccgatgctcccagctgaataaagcccttccttctacaatttggtgtctgaggggttttgtctgcggctcgtcctgctacatttcttggttccctgaccgggaagcaaggtgactgacagacggccgaggcagccccttaggcggcttaagcctgccctgtggagcatccctgcgggggactccggccagcctgagtgacgcgatccaaagagtgctcccgggtaggaaattgccccggtggaacgcctcgccagagcagcgtgtagcaggcccccgcggaggattaacacagtggctgaacaccgggaaggaactggcacttggagtccagacatctgaaacttgactgggagctgtacgtggatgggagcagcttcaccaacccctgcaaagtgactctgaagaagacgacaagccctgctccagtcacacccggaagctgactggtccacgcacggccgaagcatgaggaaactcatcgcaggactcatttttcttaaattttggacttatacagtaagggcttcaactgaccttcctcagactgagaactgtttccagtatatacatcaagtcactgagatctccagcaccctgccggtggcactactgagagacgaggtgccagggtggttcctgaaagtgcctgagccccaacttatcagcaaggagctcatcatgctgacagaagtcatggaggtctggcatggcttagtgatcgcggtggtgtccctcttcctgcaggcctgcttcctcaccgccatcaactacctgctcagcaggcacatggcccacaagagtgaacagatactgaaagcggccagtctccaggttcccaggcccagccctggccaccatcatccacctgctgtcaaagagatgaaggagactcagacagagagagacatcccaatgtctgattccctttacaggcatgacagcgacacaccctcagatagcttggatagctcctgcagttcgcctcctgcctgccaggccacagaggatgtggattacacacaagtcgtcttttctgaccctggagaactaaaatgactccccgctggactatgagaacataaaggaaatcacagattatgtcaatgtcaatccagaaagacacaagcccagtttctggtattttgtcaaccctgcttcttgtctgagccagcggaattatgatcaagtggccatgtgaattccaaatattttttaaatggggtccagttctctatggntttcttanaatttaattttgtaggggnaantgccattttnccccttttaaacaanggnttggggntaaaagntttttngggcca

SEQ ID NO: 66 - DNA, 2249 bp, Homo sapien
aaacttttgcagcggctgggtagcagcacgtctcttgctcctcagggccactgccaggcttgccgagtcctgggactgctctcgctccggctgccactctcccgcgctctcctagctccctgcgaagcaggatggccgggaccgtgcgcaccgcgtgcttggtggtggcgatgctgctcagcttggacttcccgggacaggcgcagcccccgccgccgccgccggacgccacctgtcaccaagtccgctccttcttccagagactgcagcccggactcaagtgggtgccagaaactcccgtgccaggatcagatttgcaagtatgtctccctaagggcccaacatgctgctcaagaaagatggaagaaaaataccaactaacagcacgattgaacatggaacagctgcttcagtctgcaagtatggagctcaagttcttaattattcagaatgctgcggttttccaagaggcctttgaaattgttgttcgccatgccaagaactacaccaatgccatgttcaagaacaactacccaagcctgactccacaagcttttgagtttgtgggtgaatttttcacagatgtgtctctctacatcttgggttctgacatcaatgtagatgacatggtcaatgaattgtttgacagcctgtttccagtcatctatacccagctaatgaacccaggcctgcctgattcagccttggacatcaatgagtgcctccgaggagcaagacgtgacctgaaagtatttgggaatttccccaagcttattatgacccaggtttccaagtcactgcaagtcactaggatcttccttcaggctctgaatcttggaattgaagtgatcaacacaactgatcacctgaagttcagtaaggactgtggccgaatgctcaccagaatgtggtactgctcttactgccagggactgatgatggttaaaccctgtggcggttactgcaatgtggtcatgcaaggctgtatggcaggtgtggtggagattgacaagtactggagagaatacattctgtcccttgaagaacttgtgaatggcatgtacagaatctatgacatggagaacgtactgcttggtctcttttcaacaatccatgattctatccagtatgtccagaagaatgcaggaaagctgaccaccactattggcaagttatgtgcccattctcaacaacgccaatatagatctgcttattatcctgaagatctctttattgacaagaaagtattaaaagttgctcatgtagaacatgaagaaaccttatccagccgaagaagggaactaattcagaagttgaagtctttcatcagcttctatagtgctttgcctggctacatctgcagccatagccctgtggcggaaaacgacaccctttgctggaatggacaagaactcatggagagatacagccaaaaggcagcaaggaatggaatgaaaaaccagttcaatctccatgagctgaaaatgaagggccctgagccagtggtcagtcaaattattgacaaactgaagcacattaaccagctcctgagaaccatgtctatgcccaaaggtagagttctggataaaaacctggatgaggaagggtttgaaagtggagactgcggtgatgatgaagatgagtgcattggaggctctggtgatggaatgataaaagtgaagaatcagctccgcttccttgcagaactggcctatgatctggatgtggatgatgcgcctggaaacagtcagcaggcaactccgaaggacaacgagataagcacctttcacaacctcgggaacgttcattccccgctgaagcttctcaccagcatggccatctcggtggtgtgcttcttcttcctggtgcactgactgcctggtgcccagcacatgtgctgccctacagcaccctgtggtcttcctcgataaagggaaccactttcttatttttttctatttttttttttttgttatcctgtatacctcctccagccatgaagtagaggactaaccatgtgttatgttttcgaaaatcaaatggtatcttttggaggaagatacattttagtggtagcatatagattgtccttttgcaaagaaagaaaaaaaaccatcaagttgtgccaaattattctcctatgtttggctgctagaacatggttaccatgtctttctctctcactccctccctttctatcgttctctctttgcatggatttctttgaaaaaaaataaattgctcaaata

SEQ ID NO: 67 - DNA, 3171 bp, Homo sapien
gcggaacaccggcccgccgtcgcggcagctgcttcacccctctctctgcagccatggggctccctcgtggacctctcgcgtctctcctccttctccaggtttgctggctgcagtgcgcggcctccgagccgtgccgggcggtcttcagggaggctgaagtgaccttggaggcgggaggcgcggagcaggagcccggccaggcgctggggaaagtattcatgggctgccctgggcaagagccagctctgtttagcactgataatgatgacttcactgtgcggaatggcgagacagtccaggaaagaaggtcactgaaggaaaggaatccattgaagatcttcccatccaaacgtatcttacgaagacacaagagagattgggtggttgctccaatatctgtccctgaaaatggcaagggtcccttcccccagagactgaatcagctcaagtctaataaagatagagacaccaagattttctacagcatcacggggccgggggcagacagcccccctgagggtgtcttcgctgtagagaaggagacaggctggttgttgttgaataagccactggaccgggaggagattgccaagtatgagctctttggccacgctgtgtcagagaatggtgcctcagtggaggaccccatgaacatctccatcatcgtgaccgaccagaatgaccacaagcccaagtttacccaggacaccttccgagggagtgtcttagagggagtcctaccaggtacttctgtgatgcaggtgacagccacagatgaggatgatgccatctacacctacaatggggtggttgcttactccatccatagccaagaaccaaaggacccacacgacctcatgttcacaattcaccggagcacaggcaccatcagcgtcatctccagtggcctggaccgggaaaaagtccctgagtacacactgaccatccaggccacagacatggatggggacggctccaccaccacggcagtggcagtagtggagatccttgatgccaatgacaatgctcccatgtttgacccccagaagtacgaggcccatgtgcctgagaatgcagtgggccatgaggtgcagaggctgacggtcactgatctggacgcccccaactcaccagcgtggcgtgccacctaccttatcatgggcggtgacgacggggaccattttaccatcaccacccaccctgagagcaaccagggcatcctgacaaccaggaagggtttggattttgaggccaaaaaccagcacaccctgtacgttgaagtgaccaacgaggccccttttgtgctgaagctcccaacctccacagccaccatagtggtccacgtggaggatgtgaatgaggcacctgtgtttgtcccaccctccaaagtcgttgaggtccaggagggcatccccactggggagcctgtgtgtgtctacactgcagaagaccctgacaaggagaatcaaaagatcagctaccgcatcctgagagacccagcagggtggctagccatggacccagacagtgggcaggtcacagctgtgggcaccctcgaccgtgaggatgagcagtttgtgaggaacaacatctatgaagtcatggtcttggccatggacaatggaagccctcccaccactggcacgggaacccttctgctaacactgattgatgtcaacgaccatggcccagtccctgagccccgtcagatcaccatctgcaaccaaagccctgtgcgccacgtgctgaacatcacggacaaggacctgtctccccacacctcccctttccaggcccagctcacagatgactcagacatctactggacggcagaggtcaacgaggaaggtgacacagtggtcttgtccctgaagaagttcctgaagcaggatacatatgacgtgcacctttctctgtctgaccatggcaacaaagagcagctgacggtgatcagggccactgtgtgcgactgccatggccatgtcgaaacctgccctggaccctggaaaggaggtttcatcctccctgtgctgggggctgtcctggctctgctgttcctcctgctggtgctgcttttgttggtgagaaagaagcggaagatcaaggagcccctcctactcccagaagatgacacccgtgacaacgtcttctactatggcgaagaggggggtggcgaagaggaccaggactatgacatcacccagctccaccgaggtctggaggccaggccggaggtggttctccgcaatgacgtggcaccaaccatcatcccgacacccatgtaccgtcctaggccagccaacccagatgaaatcggcaactttataattgagaacctgaaggcggctaacacagaccccacagccccgccctacgacaccctcttggtgttcgactatgagggcagcggctccgacgccgcgtccctgagctccctcacctcctccgcctccgaccaagaccaagattacgattatctgaacgagtggggcagccgcttcaagaagctggcagacatgtacggtggcggggaggacgactaggcggcctgcctgcagggctggggaccaaacgtcaggccacagagcatctccaaggggtctcagttcccccttcagctgaggacttcggagcttgtcaggaagtggccgtagcaacttggcggagacaggctatgagtctgacgttagagtggttgcttccttagcctttcaggatggaggaatgtgggcagtttgacttcagcactgaaaacctctccacctgggccagggttgcctcagaggccaagtttccagaagcctcttacctgccgtaaaatgctcaaccctgtgtcctgggcctgggcctgctgtgactgacctacagtggactttctctctggaatggaaccttcttaggcctcctggtgcaacttaatttttttttttaatgctatcttcaaaacgttagagaaagttcttcaaaagtgcagcccagagctgctgggcccactggccgtcctgcatttctggtttccagaccccaatgcctcccattcggatggatctctgcgtttttatactgagtgtgcctaggttgccccttattttttattttccctgttgcgttgctatagatgaagggtgaggacaatcgtgtatatgtactagaacttttttattaaagaaa

SEQ ID NO: 68 - DNA, 960 bp, Homo sapien
  Unsure 404-475, 502, 510, 517, 531, 546, 552, 559, 569, 575, 583,590-591, 702-751, 785-786, 791, 814, 826, 846, 886, 897, 932,939: Unknown base
gcgccttgcccgcggccccgccgggcctcaggcccggggaccctcagcgctaccttttgcctccggctctgggactgctcgtggccgcgggcgtggccggcgctgcgctcttgctggtccacgtgcgccgccgtggccactcccaggatgctgggtctcgcttgctggctgggaccccggagccgtcagtccacgcactcccggatgcactcaacaacctaaggacgcaggagggttccggggatggtccgagctcgtccgtagattggaatcgccctgaagatgtagaccctcaagggatttatgtcatatctgctccttccatctacgctcgggaggtagcgacgccccttttccccccgctacacactgggcgcgctgggcagaggcagcacctgcttttnnnnnnnnnnnnnnnnnnnnnnnnnnnnnnnnnnnnnnnnnnnnnnnnnnnnnnnnnnnnnnnnnnnnnnnncgggcgtggccggcgctgcgctcttgntggtccangtgcgcngccgtggccaatcncaggatgctgggtcncgcttnctggttnggaccccggngccgtnagtccacncactccnngatgcactcaacaacctaaggacgcaggagggttcccggggatggtccgagctcgtccgtagattggaatcgccctgaagatgtagaccctcacagggagtgtatgtaatnnnnnnnnnnnnnnnnnnnnnnnnnnnnnnnnnnnnnnnnnnnnnnnnnntccgcacgtggagtcagagcgtggatttttgtanntgctnggtggtgcccagtctctgccccngaggctttgganttcaatcttgaaggggtgtnctgggggaactttactgttgcaagttgtaaataatggttntttatatcgtnttttttcgtcaccccatctctgatagaaacacctntaaaggntattattgtgagtcaaaaaaa

SEQ ID NO: 69 - DNA, 1686 bp, Homo sapien
gcggcgactgcggcgaccgcgggacggcgagaggcacgcggcgggaggggaccggaatccgcagctccggccgcgccatggacggcaacgacaacgtgaccctgctcttcgcccctctgctgcgggacaactacaccctggcgcccaatgccagcagcctgggccccggcacggacctcgccctcgcccctgcctccagcgccggccccggccctgggctcagcctcgggccgggtccgagcttcggcttcagccccggccccactccgaccccggagcccacgaccagcggcctcgcgggcggcgcggcgagccacggcccttccccgttccctcggccctgggcgccccacgcgctcccgttctgggacacgccgctgaaccacgggctgaacgtgttcgtgggcgccgccctgtgcatcaccatgctgggcctgggctgcacggtggacgtgaaccacttcggggcgcacgtccgtcggcccgtgggcgcgctgctggcagcgctctgccagttcggcctcctgccgctgctggccttcctgctggccctcgccttcaagctggacgaggtggccgccgtggcggtgctcctgtgtggctgctgtcccggcggcaatctctccaatcttatgtccctgctggttgacggcgacatgaacctcagcatcatcatgaccatctcctccacgcttctggccctcgtcttgatgcccctgtgcctgtggatctacagctgggcttggatcaacacccctatcgtgcagttactacccctagggaccgtgaccctgactctctgcagcactctcatacctatcgggttgggcgtcttcattcgctacaaatacagccgggtggctgactacattgtgaaggtttccctgtggtctctgctagtgactctggtggtccttttcataatgaccggcactatgttaggacctgaactgctggcaagtatccctgcagctgtttatgtgatagcaatttttatgcctttggcaggctacgcttcaggttatggtttagctactctcttccatcttccacccaactgcaagaggactgtatgtctggaaacaggtagtcagaatgtgcagctctgtacagccattctaaaactggcctttccaccgcaattcataggaagcatgtacatgtttcctttgctgtatgcacttttccagtctgcagaagcggggatttttgttttaatctataaaatgtatggaagtgaaatgttgcacaagcgagatcctctagatgaagatgaagatacagatatttcttataaaaaactaaaagaagaggaaatggcagacacttcctatggcacagtgaaagcagaaaatataataatgatggaaaccgctcagacttctctctaaatgtggagatacacaggagcttctatcttgctgaaatattgcttcatatttatagcctgtggtagtgcacatggttaacataaaagataacactggttcacatcatacatgtaacaattctgatctttttaaggttcactggtgtattaaccaaacgttgtcacaaattacaaatcaatgctgtaatataatttgcacctggaatggctaacgtgaagcctgaattaaatgtggtttttagtttttaccatcaccaaaaaaaaaaaaaaaaaaaaaaaaaaaaaaaaaaaaaaaa

SEQ ID NO: 70 - DNA, 2476 bp, Homo sapien
cggccagcacaccccggcacctcctctgcggcagctgcgcctcgcaagcgcagtgccgcagcgcacgccggagtggctgtagctgcctcggcgcggctgccgccctgcgcgggctgtgggctgcgggctgcgcccccgctgctggccagctctgcacggctgcgggctctgcggcgcccggtgctctgcaacgctgcggcgggcggcatgggataacgcggccatggtgcgccgagatcgcctccgcaggatgagggagtggtgggtccaggtggggctgctggccgtgcccctgcttgctgcgtacctgcacatcccaccccctcagctctcccctgcccttcactcatggaagtcttcaggcaagtttttcacttacaagggactgcgtatcttctaccaagactctgtgggtgtggttggaagtccagagatagttgtgcttttacacggttttccaacatccagctacgactggtacaagatttggaagggtctgaccttgaggtttcatcgggtgattgcccttgatttcttaggctttggcttcagtgacaaaccgagaccacatcactattccatatttgagcaggccagcatcgtggaagcgcttttgcggcatctggggctccagaaccgcagaatcaaccttctttctcatgactatggagatattgttgctcaggagcttctctacaggtacaagcagaatcgatctggtcggcataccataaagagtctctgtctgtcaaatggaggtatctttcctgagactcaccgtccactccttctccaaaagctactcaaagatggaggtgtgctgtcacccatcctcacacgactgatgaacttctttgtattctctcgaggtctcaccccagtctttgggccgtatactcggccctctgagagtgagctgtgggacatgtgggcagggatccgcaacaatgacgggaacttagtcattgacagtctcttacagtacatcaatcagaggaagaagttcagaaggcgctgggtgggagctcttgcctctgtaactatccccattcattttatctatgggccattggatcctgtaaatccctatccagagtttttggagctgtacaggaaaacgctgccgcggtccacagtgtcgattctggatgaccacattagccactatccacagctagaggatcccatgggcttcttgaatgcatatatgggcttcatcaactccttctgagctggaaagagtagcttccctgtattacctcccctactcccttatgtgttgtgtattccacttaggaagaaatgcccaaaagaggtcctggccatcaaacataattctctcacaaagtccactttactcaaattggtgaacagtgtataggaagaagccagcaggagctctgactaaggttgacataatagtccacctcccattactttgatatctgatcaaatgtatagacttggctttgttttttgtgctattaggaaattctgatgagcattactattcactgatgcagaaagacgttcttttgcataaaagacttttttttaacactttggacttctctgaaatatttagaagtgctaatttctggcccacccccaacaggaattctatagtaaggaggaggagaaggggggctccttccctctcctcgaatgacgttatgggcacatgccttttaaaagttctttaagcaacacagagctgagtcctctttgtcatacctttggatttagtgtttcatcagctgtttttagttataaacattttgttaaaatagatattggtttaaatgatacagtattttaggtatgatttaagactatgatttacctatacattatatatattttataaagatactaaaccagcatacccttactctgccagagtagtgaagctaattaaacacgtttggtttctgaataaattgaactaaatccaaactatttcctaaaatcacaggacattaaggaccaatagcatctgtgccagagatgtactgttattagctgggaagaccaattctaacagcaaataacagtctgagactcctcatacctcagtggttagaagcatgtctctcttgagctacagtagaggggaagggattgttgtgtagtcaagtcaccatgctgaatgtacactgattcctttatgatgactgcttaactccccactgcctgtcccagagaggctttccaatgtagctcagtaattcctgttactttacagacaggaaagttccagaaactttaagaacaaactctgaaagacctatgagcaaatggtgctgaatactttttttttaaagccacatttcattgtcttagtcaaagcaggattattaagtgattatttaaaattcgtttttttaaattagcaacttcaagtataacaactttgaaactggaataagtgtttattttctattaataaaaatgaattgtgacaaaaaaaaaaccg

SEQ ID NO: 71 - DNA, 5724 bp, Homo sapien
cgggtggacaagtcacctgtctaactgtggtgagagcaacaggcctccaaaggaaagaagttgtttccgagtttgtgactggcacagtgacctctttcagtgggaggtttctgactggcaccactgtgtgcttgttccttacgctcgcggtgaagtcaagcctcggactgcagagtgtgtgacggctcagcatggactgcagcaccggatggtgcgctgcattcagaagctgaaccgaactgtggttgcaaatgaaatatgcgaacactttgcccttcagcctcctacagaacaggcttgcctcattccttgtccccgggattgtgtagtatctgagttcttaccatggtccaactgtagcaagggatgtgggaagaaattgcagcatagaactcgcgcggtcatagctccccctctctttggtggtttgcaatgtccaaatctgactgagtcaagagcctgtgatgctcccatttcctgtcctcttggggaagaggaatatacatttagccttaaggttggaccatggagtaaatgcagactgcctcatcttaaagaaattaatccaagcggaagaactgttctggattttaactctgattcaaatgagcgagtcacctttaaacatcaaagttacaaagcacatcatcattcgaagtcttgggcaatagagataggttatcaaacccggcaggtttcgtgtacaagaagtgatggacaaaatgctatgttaagcctttgccttcaagattccttcccattgactgttcagtcctgcatcatgcccaaagactgtgaaacctcccagtggtcctcctggagcccctgctccaagacatgccgttcagggagtctcttgccaggatttaggagcaggagccggaacgtgaagcacatggctattggaggtggaaaggagtgtcctgaacttcttgagaaagaggcctgcattgttgaaggagaacttctgcagcaatgtcccaggtattcctggagaacttctgaatggaaagaatgccaagtctctctcctcctcgagcagcaggatccccactggcatgtgacgggacccgtgtgtggcggtgggatccagacccgggaggtgtactgtgcccagagcgtaccagcagctgccgcactgagggccaaggaagtctctagacctgtggaaaaggcattatgtgtgggacccgccccgttgccctctcagctctgcaatatcccttgctctacggactgcatagtatcttcctggtcagcctggggcctgtgcatccatgaaaactgtcatgaacctcaggggaaaaaaggatttagaacgaggcagcgccatgtcctcatggaatctacagggcctgcagggcattgccctcatttggtggagtctgttccttgtgaggatccaatgtgctaccgatggctggcatcagaagggatctgtttccctgatcatggaaaatgtggcctgggacatcgtattctgaaggccgtctgccagaatgaccgcggagaagatgtatcagggagtctttgcccagttccccctcctcctgagaggaagtcttgtgaaattccctgccgaatggactgtgtgctgagcgagtggacggagtggtcatcctgttcccagtcctgttcaaataaaaactcagatgggaaacagaccaggtcaagaactatcctggcactggctggggaaggtggaaagccatgtccccctagtcaggctctccaagagcatcgtttgtgtaatgaccattcctgtatgcagcttcactgggagacatcgccttggggcccttgttctgaggacacattggtaactgcccttaatgcaaccattggctggaatggagaagccacgtgtggtgtaggcattcagactcggagagtcttctgtgtcaagagtcacgtgggacaagtaatgaccaaaagatgtccagattctactcgacctgaaactgtgcgcccctgttttctcccatgcaaaaaagactgtattgtgactgctttcagtgagtggacaccctgcccaaggatgtgccaagcaggaaatgccacagtaaaacagtctcgatacagaatcatcatccaagaagcagccaatggaggccaggaatgcccagataccttatatgaggagagagagtgtgaagatgtttccttgtgtcctgtatatcggtggaagccacagaaatggagcccttgcatcttagtgccagagtctgtctggcagggaataacgggcagcagtgaagcctgtggaaaggggttacaaacaagagctgtctcatgcatctctgatgacaaccggtcagcagaaatgatggaatgcctcaagcagacaaacggcatgcctctccttgtgcaagaatgcacagtcccatgtcgagaagactgcaccttcactgcttggtccaagtttacgccctgctccacgaactgtgaagccacaaaaagtaggcggcgacagctcacagggaaaagcagaaagaaggagaaatgccaggattctgacctttaccctctagtggagacagaactatgtccttgtgatgaatttatatcccaaccttatggaaactggtcagattgcattcttccagaaggcagaagggagcctcaccgaggactgcgggtacaagcagacagcaaagaatgtggagaaggcctgcgctttcgagcagtagcctgttctgataaaaatggaagacctgttgacccctccttctgcagcagctctggttacattcaagaaaaatgtgtcattccctgcccatttgattgcaagttaagcgattggtctagttgggggtcttgcagttcatcttgtggaattggagtgagaattcgatccaaatggctaaaagaaaaaccttacaatggaggacgaccatgtcccaaactggatctcaagaatcaggctcaggtacatgaggcagtcccatgttacagtgagtgcaatcagtattcctgggttgtagaacactggtcttcatgcaaaatcaacaatgagctgaggtccctgcgctgtggaggaggaacacaatctaggaaaatcagatgtgtgaatactgcggatggtgaaggtggagcagtggatagcaacctgtgcaaccaggatgaaattcccccagaaacccagtcctgttctcttatgtgtcccaatgagtgtgtcatgtctgagtggggactttggagcaaatgcccacagtcatgcgatccccacacaatgcagagaagaactcgccacctgctaagaccatcactgaactcaaggacttgtgctgaagactcacaggtgcagccttgcctcctgaatgaaaattgcttccagttccagtacaatctaacagagtggagcacatgccagctgagtgaaaacgcaccctgtggtcaaggcgtcaggacccgcctgctaagctgtgtgtgcagtgatggcaagccagtcagcatggaccaatgtgagcagcataatttggagaagccccagagaatgagcattccctgcttggtggaatgcgtggtcaactgtcagctctcagggtggacggcttggacagagtgttcacagacctgtggccatggaggtcgaatgagccggactcgatttatcattatgccaacccaaggagaaggacggccatgccccacagagcttacccaggagaaaacctgcccagtgaccccctgctacagctgggtccttggcaactggtctgcatgtaaattggagggtggagactgtggggaaggagttcagatccgcagcctttcctgcatggtccacagtggttcaatatctcatgcagctggacgtgtcgaggatgcactgtgtggagaaatgccctttcaggacagcatcctgaagcagctgtgttctgtgccttgcccaggagactgccatttaacagaatggtcagagtggagcacatgtgaattaacctgcattgatggaagaagctttgagactgtgggccgccagtctagatcaaggacttttataattcagtcttttgagaaccaagacagctgcccccaacaggttctagaaacacgcccttgtacaggaggcaaatgttatcactacacatggaaagcaagtctttggaacaataacgaacgaactgtatggtgccagcgttcagatggcgttaatgtcacaggaggctgctcccctcaggcccgtcctgctgccattcggcagtgcattccagcctgcagaaaacctttctcctactgtacacagggtggagtctgtggttgtgagaagggctatacagagataatgagatcaaatggtttcctggattactgcatgaaagtaccaggctcagaggataaaaaagctgatgtgaaaaacctttctgggaaaaacagacctgtgaattcaaaaatacatgatatttttaaaggatggtctcttcaaccacttgatccagatggccgagtaaaaatttgggtttatggcgtttcaggtggcgcttttctcatcatgattttcctaatatttacttcctaccttgtttgcaagaagccaaaaccacatcaaagcacacctccccaacagaagcctctgaccttagcctacgatggagacttagacatgtaatctgaaaaagaaatccaaatgtagacatcaactgccttaaccgctttctcttttgtagctctcagacttctcagttttttgaggaatctcaagatgtgatatattgggcagaatacaaatattgcaaaagtaatattgcctcaacttcatttggacatggagtcaaggattattaggtctgccattttgttttcaagttgtttgtgggtgtgttttatttttttggttttcccaagggacctgaaaacccttctcttcctgtttggaactgggaggaagaaaacatgatggaattcccacagacttgagtaaacttgatcttcagcagcataatgacaatccagaggaaaatacagtcaaggcatttactctaaatgacgagtctgacactgcattgttacgcactatattagtgcaaagtctttattcttcccatacttcaacactgagttttctagagtttactttggtttaaagactttcaaattggattgcctatttttcatgaacacagagagaatggattaccatttcagaaattctctgagtttttaacctttaaatattgtattttgttttgtagccaggggatgatggcgcttcatgggttgcagctactgaaaatagcagcgtgtgtgtaattgctggactagatgaaagctaggtcatttctgaagggaatgtgtactgaatgttagagtgtacaaatgaaatatgtggttaaattggagaatgaggtagattatttgattactaaaactgtattttaacaaaaacttatccatgtagatatagcattaaccacacacagttgtaattcagtttaatgatgacaaactctgcttttgtaatttcaattttcttatctgaatatttataaattcttctttcaaatttaattatctgacctcatttaatatacatcaaacaccgatcctgtttgtacaaagtcttgcttttataaggtttcaataatatctaaaacaacacattaaaaagctgagaccattttatgaagataattgtttgtaatcataggtgttgaaagtaaaaaggtgccatcttgtggtattgacttgtatttataacaaataaactgctcaagagactgc

SEQ ID NO: 72 - DNA, 4450 bp, Homo sapien
cccacctcggccacactgcttcgctcccccctccccaccttcagctggcaccgcaaacaagccttacctcgttgcatctgcgaggagaggtagcaacagcgagcctagccagccagaggcggtggagaggaggaaggggcggggtgggggggcagagagcgggccgaggccgcccttggtgggggtagcgggggcagagctgccgagcagacccggcagccgccctcctccgcccccaccctccagaagcactcttgcctgagaaccgaattattccactagtattatttcattttttattactccccctcctcactccccagccgcccccacccccacgccggcctcgcctctggttgcatggcagcgctgcccgggcgcgggggctcagggctggcccccagggaagggggaggaggaggaggatcatgaaggccggagtcgcgaccgcgccggacggcgggcagcagccagaggacgagccggagcagcccccgccccggagacacccggacgccgagcagcagtcgcctccgccgccgcagcagcagctgcgggcgcgggccgacccggagccggaggaggagggcgaccgcgacccagaggaggaagaggaggagaaggcgaggccactcgcccgcccggacctgcccttctctcggctcttgcccctcgaccgaagggacctttgatggaaccgaggggagggcgccacggatttgccgactgcagcaggggtgggctgggggctgagataatgtaaccactcctttctcctgttctctcccacacgcccctctcctctacccctattctctgctccactgccctctcaccccggtacacacacccttcctctagccaggatcttcatgctcaggaaggaggcgcctctgcaagggttaaacgatcttttctttttctcccatcctttttccttcccaaacctctattttacctcccttctcctaattggctttcccctcttcggtgtaaccctttggctgcggaggcaaagcacaagcccctagcccagtttcacctgcaacacccctcccccacccaactgctctcttaaaagcaactctggtgcttctgggggttaattgccccagttttctgcccaggagaattaaaacttctcccaatcttctctcctcccctaccttgactcccccaacccctaccacctgagaaaaacgatcttttctctctcacacatgcagtcctcaattcttcattgagctagttttctctaagcccagctcaatccactccagatttgatttacaattgtccccacccttttatataaaagaaagatttctcactgcgtaggaatttgagaagaacccaataatcctttcctggggaacttttaaacaattcgacattgatttaaacaattcgacagaggctctagtggcccctccaccacgcttcttcaatccctctgctcctaccagtgtcctcaggtcaaaagcagaaaggagacacactgaacaaagttggaggttggggtgggtgtgtgagggcaagaaaaacttttttgttattgggctttccaggtggagttcagaaccagtgactcacacttctcagtcctgggagcaatttatttgctacttggaggggttgtaagaaaagccagtgagaaagcagactccccccacaacacagatccactgtggacccccaaaacctgtcctgtccccctcttttaagactccagccacccctcttgggctctctacttccacggggcacatgctgatgcccctgtgtgggctgctctggtggtggtggtgctgctgctccggctggtactgctatggattgtgtgccccagccccccagatgttgcgccaccagggtctcctcaagtgccgctgccgcatgctcttcaatgacctgaaggttttcttactgcggcgccctcctcaagcgcccctgcccatgcacggcgacccccagccccccggtttggcggccaacaacacccttccggctctgggcgccggggggtgggcaggctggaggggcccccgagaagtggtgggcagggagccccctcctgtgccacctccaccccccttgccaccttcttctgtggaagatgactggggtggcccagccacagagccacctgcctcgctgctcagcagtgcctcctcagatgacttctgtaaggagaagaccgaggatcgctactcactgggcagcagcttggacagtggtatgaggaccccactctgccgcatctgcttccaggggccagaacagggggagctgctgagcccatgccgctgtgatggctcggtcaagtgcacacaccagccttgcctcatcaagtggatcagcgagcggggctgctggagctgcgagctgtgctactacaagtaccacgtcatcgccataagcacaaaaaatcctctgcagtggcaggccatctctctgacggtcattgagaaggttcaggttgcagccgccatcctgggctccctcttcctcatcgccagtatttcttggctcatctggtcaactttcagcccctcggcaagatggcagcgccaagaccttctcttccagatctgctacgggatgtatggcttcatggacgtggtgtgcataggtctcatcatccatgaaggaccctcggtgtaccgcatctttaaacggtggcaggctgtcaaccagcagtggaaagtgctgaactatgacaagacaaaagacctggaggatcaaaaggcaggaggcaggaccaacccccggacctcctcatccacccaggccaatatcccctcctcggaagaggagaccgcaggcacccctgcccctgagcagggccctgcccaggctgccggccacccctcaggccctctgtcccatcaccactgtgcttataccatcctgcacatcctgagtcacttgagacctcatgaacagcgaagtcccccaggcagcagccgagagctggtcatgagagtcacgacagtgtgagagcagaggcccggaaggaaggccatgaccaccactgagggcccggagcagggtggggaggtgcagtggcacccccggagccaacagagggagcaggcagagggtgggggacctggcgggagccctggggtagtgtcagagcgggagtgaggctggtgcaggagcagttctgctatttccaatcagtcaatgccactctccacaacaacaatgaaaaccaacaccaactcaacaacaaagtgcaatacaggctgaacctggcccaacagaaaaaccctgccccaatgcacctgcaggcaaggtacccgaagaagcagaggctgagggcaggcaaagcctgtgtgactgtggcagtgccggaggccaagggggccaagaggaaaagcatctgtggtctgccctgctctcaccctgtttggttttgtttctcctggggctgtgttctgcaggcagccagaaaaggaggaggcacgggtgagctggcagggacacactgcctttggggctcctgggctcatttggatgagcaagattcgctgacaaatggctgtggggatggtggggtggatggtcagggagggatcctcagggagggatatgctggtgtgagcagccagagggagagtgtgtctccttcctgaaggaacttccaaatggaactcccgatttcaggtgggctaaaagagggcttaggtttggaaaagggtgtccttctgtgcccttgttaatttattttatagtgatttggttcaaagatgtttacaggacacacacacacacacacacacacacacacacacacacacacccctagagaaaagtacagatttccagtggatatttcaagcacagttctgctgctgtggcttcagctttggaagctgtcaatcccggagcaactttcccaactacccaaccccaccatggccaggacatgtgcaatgccagccccttcttgtcttggcacatgcacagacccagtcccctcacggtagggcacccctgacctacgggcttccaagagagcagctgcagtggttgggaggagcttgaccagtgtgccccaaggagtggagtagagcccaatctaagtattccttgctgcttggaaccctccctgtttggaaccctccccaaagaggcagtcaggctgatgctcagtgctttgtgctccctgctccttcccgcgtagccaggtgggcccaagggtgcctggcagggagcactacccctggacccctcctgctcgctctggggaccctgccagggaaggccactgggtgttcacctgcaaagtttctggttgtcactgcacagtggtcgcgtcatccatgggtattaaaaggacactgtcaagtacttttttaaactagtttttagggttttttaaaactctctgttgtttgtaatattctcttaaaagcttgaaaataaaacttctttccctacc

SEQ ID NO: 73 - DNA, 3758 bp, Homo sapien
caggagcaaggggacaagatgatggaggaatacagcctggagaaaaatgagagggcctgcattgatttcgccatcagcgccaagccgctgacccgacacatgccgcagaacaagcagagcttccagtaccgcatgtggcagttcgtggtgtctccgcctttcgagtacacgatcatggccatgatcgccctcaacaccatcgtgcttatgatgaagttctatggggcttctgttgcttatgaaaatgccctgcgggtgttcaacatcgtcttcacctccctcttctctctggaatgtgtgctgaaagtcatggcttttgggattctgaattatttccgcgatgcctggaacatcttcgactttgtgactgttctgggcagcatcaccgatatcctcgtgactgagtttgggaataacttcatcaacctgagctttctccgcctcttccgagctgcccggctcatcaaacttctccgtcagggttacaccatccgcattcttctctggacctttgtgcagtccttcaaggccctgccttatgtctgtctgctgatcgccatgctcttcttcatctatgccatcattgggatgcaggtgtttggtaacattggcatcgacgtggaggacgaggacagtgatgaagatgagttccaaatcactgagcacaataacttccggaccttcttccaggccctcatgcttctcttccggagtgccaccggggaagcttggcacaacatcatgctttcctgcctcagcgggaaaccgtgtgataagaactctggcatcctgactcgagagtgtggcaatgaatttgcttatttttactttgtttccttcatcttcctctgctcgtttctgatgctgaatctctttgtcgccgtcatcatggacaactttgagtacctcacccgagactcctccatcctgggcccccaccacctggatgagtacgtgcgtgtctgggccgagtatgaccccgcagcttgcggtcggattcattataaggatatgtacagtttattacgagtaatatctccccctctcggcttaggcaagaaatgtcctcatagggttgcttgcaagcggcttctgcggatggacctgcccgtcgcagatgacaacaccgtccacttcaattccaccctcatggctctgatccgcacagccctggacatcaagattgccaagggaggagccgacaaacagcagatggacgctgagctgcggaaggagatgatggcgatttggcccaatctgtcccagaagacgctagacctgctggtcacacctcacaagtccacggacctcaccgtggggaagatctacgcagccatgatgatcatggagtactaccggcagagcaaggccaagaagctgcaggccatgcgcgaggagcaggaccggacacccctcatgttccagcgcatggagcccccgtccccaacgcaggaagggggacctggccagaacgccctcccctccacccagctggacccaggaggagccctgatggctcacgaaagcggcctcaaggagagcccgtcctgggtgacccagcgtgcccaggagatgttccagaagacgggcacatggagtccggaacaaggcccccctaccgacatgcccaacagccagcctaactctcagtccgtggagatgcgagagatgggcagagatggctactccgacagcgagcactacctccccatggaaggccagggccgggctgcctccatgccccgcctccctgcagagaaccagaccatctcagacaccagccccatgaagcgttcagcctccgtgctgggccccaaggcccgacgcctggacgattactcgctggagcgggtcccgcccgaggagaaccagcggcaccaccagcggcgccgcgaccgcagccaccgcgcctctgagcgctccctgggccgctacaccgatgtggacacaggcttggggacagacctgagcatgaccacccaatccggggacctgccgtcgaaggagcgggaccaggagcggggccggcccaaggatcggaagcatcgacagcaccaccaccaccaccaccaccaccaccaccccccgccccccgacaaggaccgctatgcccaggaacggccggaccacggccgggcacgggctcgggaccagcgctggtcccgctcgcccagcgagggccgagagcacatggcgcaccggcagggcagtagttccgtaagtggaagcccagccccctcaacatctggtaccagcactccgcggcggggccgccgccagctcccccagaccccctccaccccccggccacacgtgtcctattcccctgtgatccgtaaggccggcggctcggggcccccgcagcagcagcagcagcagcagcagcagcagcagcaggcggtggccaggccgggccgggcggccaccagcggccctcggaggtacccaggccccacggccgagcctctggccggagatcggccgcccacggggggccacagcagcggccgctcgcccaggatggagaggcgggtcccaggcccggcccggagcgagtcccccagggcctgtcgacacggcggggcccggtggccggcatctggcccgcacgtgtccgaggggcccccgggtccccggcaccatggctactaccggggctccgactacgacgaggccgatggcccgggcagcgggggcggcgaggaggccatggccggggcctacgacgcgccaccccccgtacgacacgcgtcctcgggcgccaccgggcgctcgcccaggactccccgggcctcgggcccggcctgcgcctcgccttctcggcacggccggcgactccccaacggctactacccggcgcacggactggccaggccccgcgggccgggctccaggaagggcctgcacgaaccctacagcgagagtgacgatgattggtgctaagcccgggcgaggtggcgcccgcccggccccccacgcaccccacgcacacaccccacccgaggagccgcgcagaggccgcgggggcccagcacagagggcccgggagagggccagccgggagaccccagactctggagaggccagggctgggccacaagggtgtcccgcagagaccctcggccaaaagagaccctcctgggcagccacggcgccccccaaccagccccgatccccccacccacgacaggggctctcgggtgggaggcagggagcagacaaaccacacagccaagggatttgaattaactcagccatttttggagaactttggggaacatgaaaaaaaaaaaaaaaaaaaaaaaaacatttttaaaagaaaaaacggggagaaaaaaatagcttctattgatgagttttatcatctcaattgaatctttcctttccctgatgaagacagctggtggccgagtgcggcaaagaagccagaaggaaccagaatcccagtgccctacacccaccaccagacacactcacacccacacacgttctcagacacacacaagagtgcttgccggttataccaaaccctactattactgcctgcagaaatcaatttaaaaaaataataataacaataaacaattttaaaaaggacaaaaaaattaatgattgagaaaagaggcatttttttctgacatttggtcctgcttgaaacaacaaaagaagaagaaaaacccaccatcaccaccgattcctttgcttcttttttccttttttcctaccttgtttgaaaaccgtgggcttgggactgtgaa

SEQ ID NO: 74 - DNA, 4306 bp, Homo sapien
ctgcccctgggtctctgcgcctttgcatgagactttacggtaagccgctcctcccgcgcccccgcccccagccccgctcggcgatccccggcgccgtcgccaggcgctggccgtggtgctgattctgtcaggcgctggcggcggcagcggcggtgacggctgcggccccgctccctctacccggccggacccggctctgcccccgcgcccaagccccaccaagccccccgccctcccgccgcggtcccagcccagggcgcggccgcaaccagcaccatgcgcccggtagccctgctgctcctgccctcgctgctggcgctcctggctcacggactctctttagaggccccaaccgtggggaaaggacaagccccaggcatcgaggagacagatggcgagctgacagcagcccccacacctgagcagccagaacgaggcgtccactttgtcacaacagcccccaccttgaagctgctcaaccaccacccgctgcttgaggaattcctacacgaggggctggaaaagggagatgaggagctgaggccagcactgtcctttcagcctgacccacctgcacccttcaccccaagtccccttccccgcctggccaaccaggacagccgccctgtctttaccagccccactccagccatggctgcggtacccactcagccccagtccaaggagggaccctggagtccggatccggagtcagagtcccctatgcttcgaatcacagctcccctacctccagggcccagcatggcagtgcccaccctaggcccaggggagatagccagcactacaccccccagcagagcctggacaccaacccaagagggtcctggagacatgggaaggccgtgggttgcagaggttgtgtcccagggcgcagggatcgggatccaggggaccatcacctcctccacagcttcaggagatgatgaggagaccaccactaccaccaccatcatcaccaccaccatcaccacagtccagacaccaggcccttgtagctggaatttctcaggcccagagggctctctggactcccctacagacctcagctcccccactgatgttggcctggactgcttcttctacatctctgtctaccctggctatggcgtggaaatcaaggtcaagaatatcagcctccgggaaggggagacagtgactgtggaaggcctgggggggcctgacccactgcccctggccaaccagtctttcctgctgcggggccaagtcatccgcagccccacccaccaagcggccctgaggttccagagcctcccgccaccggctggccctggcaccttccatttccattaccaagcctatctcctgagctgccactttccccgtcgtccagcttatggagatgtgactgtcaccagcctccacccagggggtagtgcccgcttccattgtgccactggctaccagctgaagggcgccaggcatctcacctgtctcaatgccacccagcccttctgggattcaaaggagcccgtctgcatcggtgagtgcccaggggtgatccgcaatgccaccaccggccgcatcgtctctccaggcttcccgggcaactacagcaacaacctcacctgtcactggctgcttgaggctcctgagggccagcggctacacctgcactttgagaaggtttccctggcagaggatgatgacaggctcatcattcgcaatggggacaacgtggaggccccaccagtgtatgattcctatgaggtggaatacctgcccattgagggcctgctcagctctggcaaacacttctttgttgagctcagtactgacagcagcggggcagctgcaggcatggccctgcgctatgaggccttccagcagggccattgctatgagccctttgtcaaatacggtaacttcagcagcagcacacccacctaccctgtgggtaccactgtggagttcagctgcgaccctggctacaccctggagcagggctccatcatcatcgagtgtgttgacccccacgacccccagtggaatgagacagagccagcctgccgagccgtgtgcagcggggagatcacagactcggctggcgtggtactctctcccaactggccagagccctacggtcgtgggcaggattgtatctggggtgtgcatgtggaagaggacaagcgcatcatgctggacatccgagtgctgcgcataggccctggtgatgtgcttaccttctatgatggggatgacctgacggcccgggttctgggccagtactcagggccccgtagccacttcaagctctttacctccatggctgatgtcaccattcagttccagtcggaccccgggacctcagtgctgggctaccagcagggcttcgtcatccacttctttgaggtgccccgcaatgacacatgtccggagctgcctgagatccccaatggctggaagagcccatcgcagcctgagctagtgcacggcaccgtggtcacttaccagtgctaccctggctaccaggtagtgggatccagtgtcctcatgtgccagtgggacctaacttggagtgaggacctgccctcatgccagagggtgacttcctgccacgatcctggagatgtggagcacagccgacgcctcatatccagccccaagtttcccgtgggggccaccgtgcaatatatctgtgaccagggttttgtgctgatgggcagctccatcctcacctgccatgatcgccaggctggcagccccaagtggagtgaccgggcccctaaatgtctcctggaacagctcaagccatgccatggtctcagtgcccctgagaatggtgcccgaagtcctgagaagcagctacacccagcaggggccaccatccacttctcgtgtgcccctggctatgtgctgaagggccaggccagcatcaagtgtgtgcctgggcacccctcgcattggagtgaccccccacccatctgtagggctgcctctctggatggttctacaacagtcgcagcctggatggttgccaaggcacctgctgcctccagcaccctggatgctgcccacattgcagctgccatcttcttgccactggtggcgatggtgttgttggtaggaggtgtatacttctacttctccaggctccagggaaaaagctccctgcagctgccccgcccccgcccccgcccctacaaccgcattaccatagagtcagcgtttgacaatccaacttacgagactggatctctttcctttgcaggagacgagagaatatgaagtctccatctaggtgggggcagtctagggaagtcaactcagacttgcaccacagtccagcagcaaggctccttgcttcctgctgtccctccacctcctgtatataccacctaggaggagatgccaccaagccctcaagaagttgtgcccttccccgcctgcgatgcccaccatggcctattttcttggtgtcattgcccacttggggcccttcattgggcccatgtcagggggcatctacctgtgggaagaacatagctggagcacaagcatcaacagccggcatcctgagcctcctcatgccctggaccagcctggaacacactagcagagcaggagtacctttctccacatgaccaccatcccgccctggcatggcaacctgcagcaggattaacttgaccatggtgggaactgcaccagggtactcctcacagcgccatcaccaatggccaaaactcctctcaacggtgacctctgggtagtcctggcatgccaacatcagcctcttgggaggtctctagttctctaaagttctggacagttctgcctcctgccctgtcccagtggaggcagtaattctaggagatcctaaggggttcagggggaccctacccccacctcaggttgggcttccctgggcactcatgctccacaccaaagcaggacacgccattttccactgaccaccctataccctgaggaaagggagactttcctccgatgtttatttagctgttgcaaacatcttcaccctaatagtccctcctccaattccagccacttgtcaggctctcctcttgaccactgtgttatgggataaggggagggggtgggcatattctggagaggagcagaggtccaaggacccaggaatttggcatggaacaggtggtaggagagccccagggagacgcccaggagctggctgaaagccactttgtacatgtaatgtattatatggggtctgggctccagccagagaacaatcttttatttctgttgtttccttattaaaatggtgtttttggaaaaaaaa

SEQ ID NO: 75 - DNA, 7420 bp, Homo sapien
  Unsure 3356, 3743, 3962, 3966, 3968, 3976, 3988: Unknown base
gctgagcctgagcccgacccggggcgcctcccgccaggcaccatggtgcagaagtcgcgcaacggcggcgtataccccggcccgagcggggagaagaagctgaaggtgggcttcgtggggctggaccccggcgcgcccgactccacccgggacggggcgctgctgatcgccggctccgaggcccccaagcgcggcagcatcctcagcaaacctcgcgcgggcggcgcgggcgccgggaagccccccaagcgcaacgccttctaccgcaagctgcagaatttcctctacaacgtgctggagcggccgcgcggctgggcgttcatctaccacgcctacgtgttcctcctggttttctcctgcctcgtgctgtctgtgttttccaccatcaaggagtatgagaagagctcggagggggccctctacatcctggaaatcgtgactatcgtggtgtttggcgtggagtacttcgtgcggatctgggccgcaggctgctgctgccggtaccgtggctggagggggcggctcaagtttgcccggaaaccgttctgtgtgattgacatcatggtgctcatcgcctccattgcggtgctggccgccggctcccagggcaacgtctttgccacatctgcgctccggagcctgcgcttcctgcagattctgcggatgatccgcatggaccggcggggaggcacctggaagctgctgggctctgtggtctatgcccacagcaaggagctggtcactgcctggtacatcggcttcctttgtctcatcctggcctcgttcctggtgtacttggcagagaagggggagaacgaccactttgacacctacgcggatgcactctggtggggcctgatcacgctgaccaccattggctacggggacaagtacccccagacctggaacggcaggctccttgcggcaaccttcaccctcatcggtgtctccttcttcgcgctgcctgcaggcatcttggggtctgggtttgccctgaaggttcaggagcagcacaggcagaagcactttgagaagaggcggaacccggcagcaggcctgatccagtcggcctggagattctacgccaccaacctctcgcgcacagacctgcactccacgtggcagtactacgagcgaacggtcaccgtgcccatgtacagacttatccccccgctgaaccagctggagctgctgaggaacctcaagagtaaatctggactcgctttcaggaaggaccccccgccggagccgtctccaagccagaaggtcagtttgaaagatcgtgtcttctccagcccccgaggcgtggctgccaaggggaaggggtccccgcaggcccagactgtgaggcggtcacccagcgccgaccagagcctcgaggacagccccagcaaggtgcccaagagctggagcttcggggaccgcagccgggcacgccaggctttccgcatcaagggtgccgcgtcacggcagaactcagaagaagcaagcctccccggagaggacattgtggatgacaagagctgcccctgcgagtttgtgaccgaggacctgaccccgggcctcaaagtcagcatcagagccgtgtgtgtcatgcggttcctggtgtccaagcggaagttcaaggagagcctgcggccctacgacgtgatggacgtcatcgagcagtactcagccggccacctggacatgctgtcccgaattaagagcctgcagtccagagtggaccagatcgtggggcggggcccagcgatcacggacaaggaccgcaccaagggcccggccgaggcggagctgcccgaggaccccagcatgatgggacggctcgggaaggtggagaagcaggtcttgtccatggagaagaagctggacttcctggtgaatatctacatgcagcggatgggcatccccccgacagagaccgaggcctactttggggccaaagagccggagccggcgccgccgtaccacagcccggaagacagccgggagcatgtcgacaggcacggctgcattgtcaagatcgtgcgctccagcagctccacgggccagaagaacttctcggcgcccccggccgcgccccctgtccagtgtccgccctccacctcctggcagccacagagccacccgcgccagggccacggcacctcccccgtgggggaccacggctccctggtgcgcatcccgccgccgcctgcccacgagcggtcgctgtccgcctacggcgggggcaaccgcgccagcatggagttcctgcggcaggaggacaccccgggctgcaggccccccgaggggaccctgcgggacagcgacacgtccatctccatcccgtccgtggaccacgaggagctggagcgttccttcagcggcttcagcatctcccagtccaaggagaacctggatgctctcaacagctgctacgcggccgtggcgccttgtgccaaagtcaggccctacattgcggagggagagtcagacaccgactccgacctctgtaccccgtgcgggcccccgccacgctcggccaccggcgagggtccctttggtgacgtgggctgggccgggcccaggaagtgaggcggcgctgggccagtggacccgcccgcggccctcctcagcacggtgcctccgaggttttgaggcgggaaccctctggggcccttttcttacagtaactgagtgtggcgggaagggtgggccctggaggggcccatgtgggctgaaggatgggggctcctggcagtgaccttttacaaaagttattttccaacagggcactcccaggccctgtcgccattgaggtgcctccgctgggctgtctcctcacccctccctgtgctggagcctgtcccaaaaaggtgccaactgggaggcctcggaagccactgtccaggctcccactgcctgtctgctctgttcccaaaggcagcgtgtgtggcctcgggccctgcggtggcatgaagcatcccttctggtgtgggcatcgctacgtgttttgggggcagcgtttcacggcggtgcccttgctgtctcccttgggctggctcgagcctggggtccatgtccctttgccgtcccgtcatggggcagggaatccatagcggggcccacaggcaggggtatgagtgcgtcccacccaacgcagcaccagccccggccaccgctccccgtgtccccagttccgtctcagctacctggactccaggaccctggagaagggagacctggcagtggagggaggctgtgctgtgtgtccccctgcaggtgtgaccccgcctgctctttcctcccccgccaggtgtggccccgcctgctctttcctcccccaccagtatggccccacctgctctttcctncccccccaaggtgtggccccacctgttctttcctcccctgccgaggtgtgaccccacctgctctttcctccctcccagtatggccccacctgctctttcctcccccgaggtgaggccccgcctgctctttcctcccatgggagccgctgaggcgtgcgcacctgggcacaggttggggctctgcaggatgaggaagacaggccaatcccttccctcccagaagctggccgcccagcaggagggactgaggccagactcatgtccagcaaggaacgtgtggtgtgtcccctgggaagtctctgggccctgggaagagggaaggtgcacgtcctgggatggttgcggggccctgttttgggagacaaaggggtagagggtctgtcttgngcccccccagactctagcccgagcagtgcagccacctactgccccacctcagagaagtgcagcgggaaggaggctggaggtggtgcggcgctgcctcgggtgtctgcgtgaatgagcgtggccaaggaccagtgccacctcatggcaaagagctcccgcagtgtttgttagagtgcacatcctacgtgcccactggcacacacacgtgctcacatacangtcngngtacaggngtacacatgcangcttgcacacatgcacacagaccacatagcacacatgtgcactgaccacacctgtatagaccatgcacagtacacatacgtgcatacacatgcctgcatacaggcatacacatgcacgcttacatgtacacgtgcacagatcacacacatgcacacacgtgtagctcacacacagtatacacatacacaagtgcacagaccacacacagcactaacacatgcacacacaaagtgcataggccacacagcacatgcacacaggtgcacagaccacacagcacacacaagtgcacagagcacactgcacacatgcacacacacacgcgtgcatgcacactcctcgcacttccagccttggagcccttctgtctctggtctttctctttgaccctgctgagtgtaagctgcctggggaggggctacaaggagtaattgtggctttaggggtcgtggtgatgctggaatgtcaagcgccgtcgtggggtatccgactgtccgggctcctggtccgcagtggcagagcgccaggcagagccaatcagggtctcgtgctgcccttcccccccacagcctggcagccatccagaggaggggctctaccagatgccaaggtgccccggtgtctgtatgggtgtccggttgggtcctgtgtttggtctgccctggaggtggctgggccctcctgggatgggtggctcagcctcgaatcccaggccccagcccaggcaggtgctgctgcctgttgtggtttcctggcccagcttctccttctccctctgcataaaatcacagtccgtgagtcttccagctgccaccacggctgggacacgctgggggagggctcctcccatgcctcctgcacacagccgtctgagcagggcaggtgccaacaccccccaccggagacacgctgcccctcagcgatgcccctaccttttggggggcctcgtctcaagcccccccttggaggctgaaatcaccccaggcactgtgagggcttctccagggggacaccctttgagctgtgggtctgatcaccccaagtcccgcacacggaggagaggcacagccagggcgtgtggtttaatgtttgccccttcggggctggaggtctcagtgtttctagattccagaccctgctgccagagagacctgctgccggagagaaggggaggaggactccagctgggctcggtcccccacagtcagggacccccataaaggacacccccttctctctagaaagagctgggctctcagctatttctagttgcttcccagaagccgaggagcagaaggagctgtgagagctttgcagaaacgcccttgtccccgccctcctgagctatgaatgccgtacagagcagaggctggggcattggcaagatcacaggttgatgctgcacagccccattgacacaaaccctcaaagcagacgtgagagggacggttcacaaagcttggacctgccgtggagggtgcccggcagacgtggcgtgagagggacggctcacgaggcttggacctgctgtggagggtgcccagcagacgtggtgtgagaggaacggctcacgagacttggacctggtggagggtgcccagcagacgtggtgtgagagggacggctcacagggcttggaccggagagagatggctcatgagacttggacctgccgtggagggtgcccagcagacgtggtatgagagggatggctcacgaggcttggacctggtggagggtgcccggcagacgtgtgagagggacggttcacaaggcttggacctgccatggagggtgcccagcagacgtggtgtgagagggacagctcacgaggcttggacctgccgtggagggtgcccagcagggggctgagctctgaggggtgggtgctcagtgcacgggtgcccccagtgtcctctgatcctgtccggtgcctcccccaacccccacacccatgcagaactcccaggtcacatgcacgtatgtccagggcatgggggtggcgtgaagaggcctggtcagggcctttaggggctgcaggacggaatggccacctggggagcctgtgtggctgtgccgggcagccatcctgcattcccacccagcgcgcagtctccacctcggccccagcaaagcgctaagcagccggagagacagccagggcggcttcctgaaggatgtgggatggtggactccggggtcgagggaatacgcaggttcctgtcctccgggagacctagagaagctgcacacccaggagctttccatgacccgggagcatgagtgaatggggggttccagtttgctgaactttgctgtcttgtaagggtgggggctgacggccgaccctgggaggaggtgacaccgcagggggaggttgtgggcaacggtggaggaggagagacgggaggggaccatttgggatggaggggcctcttcagagttttaaaaggcgtttgtggggtggagttgagtgtgctctgggcttggacacttgccgtggtgcccctggctggccgaggagactggctctggccagggccccgtcctgagaggtcctcagcgtctgactctcggccaggcgccagcaaggaggggccggtccccggggctaccaggcaggcacgtgcacatcgccatcgccacacgccaactccgcctgggttttacaaagtcgttgccttaatgcatgtggacaggaactccctgaggtcgccccatgccccctggctgtgccaggtacggacgccctggaccctgcgaacaggtggggcgggcgaggggcccaagggacgggctccagagacacgcgcagggcaggaggggtctcacggaggggtctcgcactgaggcgcccagagctggtggtcccgctggacgccatccctctgcccgggatccacacggcccacgtgtgcccgccatgcccgcgccccacgccattgcagtcttccatcctctggccgtgacggtggctgcagcttccccatttgcgccgttgcctctggctgtctgcacttttgttcatgctccaaagaacatttcataatgccttcagtaccgacgtacacttctgaccattttgtatgtgtccttgtgccgtagtgaccaggcctttttttggtggatgtgttaccccgcacacttcaatctcaactttgtgcaccgtccattttctagggatagacgcccagggaatgaactctagttttctaacagattagctgagatattaacttactcacacggacaggttgatgccagagccgtaagaatgcgccagtgcgggtttgcgggggacttcgggtgtggggtcctgcggccgcgatggccgtggaaggttctggggatccctgctgccacggggacgagttcggacgccaggtggacctgtgcactcagtaaaacgcagtgattcaaaaaaaaaaaaa

SEQ ID NO: 76 - DNA, 1433 bp, Homo sapien
ggcacgaggcaagtccggatgaagaattaagagaaaaaaagtgaatatggtttttgctcacagaatggataacagcaagccacatttgattattcctacacttctggtgcccctccaaaaccgcagctgcactgaaacagccacacctctgccaagccaatacctgatggaattaagtgaggagcacagttggatgagcaaccaaacagaccttcactatgtgctgaaacccggggaagtggccacagccagcatcttctttgggattctgtggttgttttctatcttcggcaattccctggtttgtttggtcatccataggagtaggaggactcagtctaccaccaactactttgtggtctccatggcatgtgctgaccttctcatcagcgttgccagcacgcctttcgtcctgctccagttcaccactggaaggtggacgctgggtagtgcaacgtgcaaggttgtgcgatattttcaatatctcactccaggtgtccagatctacgttctcctctccatctgcatagaccggttctacaccatcgtctatcctctgagcttcaaggtgtccagagaaaaagccaagaaaatgattgcggcatcgtggatctttgatgcaggctttgtgacccctgtgctctttttctatggctccaactgggacagtcattgtaactatttcctcccctcctcttgggaaggcactgcctacactgtcatccacttcttggtgggctttgtgattccatctgtcctcataattttattttaccaaaaggtcataaaatatatttggagaataggcacagatggccgaacggtgaggaggacaatgaacattgtccctcggacaaaagtgaaaactatcaagatgttcctcattttaaatctgttgtttttgctctcctggctgccttttcatgtagctcagctatggcacccccatgaacaagactataagaaaagttcccttgttttcacagctatcacatggatatcctttagttcttcagcctctaaacctactctgtattcaatttataatgccaattttcggagagggatgaaagagactttttgcatgtcctctatgaaatgttaccgaagcaatgcctatactattacaacaagttcaaggatggccaaaaaaaactacgttggcatttcagaaatcccttccatggccaaaactattaccaaagactcgatctatgactcatttgacagagaagccaaggaaaaaaagcttgcttggcccattaactcaaatccaccaaatacttttgtctaagttctcattctttcaattgttatgcaccagagattaaaaagctttaactataaaaacagaagctatttacatatttgttttcactcaactttccaagggaaatgttttattttgtaaaatgcattcatttgtttactgt

SEQ ID NO: 77 - DNA, 3561 bp, Homo sapien
gccatggccgtccggcccggcctgtggccagcgctcctgggcatagtcctcgccgcttggctccgcggctcgggtgcccagcagagtgccaccgtggccaacccagtgcctggtgccaacccggacctgcttccccacttcctggtggagcccgaggatgtgtacatcgtcaagaacaagccagtgctgcttgtgtgcaaggccgtgcccgccacgcagatcttcttcaagtgcaacggggagtgggtgcgccaggtggaccacgtgatcgagcgcagcacagacgggagcagtgggctgcccaccatggaggtccgcattaatgtctcaaggcagcaggtcgagaaggtgttcgggctggaggaatactggtgccagtgcgtggcatggagctcctcgggcaccaccaagagtcagaaggcctacatccgcatagcctatttgcgcaagaacttcgagcaggagccgctggccaaggaggtgtccctggagcagggcatcgtgctgccctgccgtccaccggagggcatccctccagccgaggtggagtggctccggaacgaggacctggtggacccgtccctggaccccaatgtatacatcacgcgggagcacagcctggtggtgcgacaggcccgccttgctgacacggccaactacacctgcgtggccaagaacatcgtggcacgtcgccgcagcgcctccgctgctgtcatcgtctacgtggacggcagctggagcccgtggagcaagtggtcggcctgtgggctggactgcacccactggcggagccgtgagtgctctgacccagcaccccgcaacggaggggaggagtgccagggcactgacctggacacccgcaactgtaccagtgacctctgtgtacacactgcttctggccctgaggacgtggccctctatgtgggcctcatcgccgtggccgtctgcctggtcctgctgctgcttgtcctcatcctcgtttattgccggaagaaggaggggctggactcagatgtggctgactcgtccattctcacctcaggcttccagcccgtcagcatcaagcccagcaaagcagacaacccccatctgctcaccatccagccggacctcagcaccaccaccaccacctaccagggcagtctctgtccccggcaggatgggcccagccccaagttccagctcaccaatgggcacctgctcagccccctgggtggcggccgccacacactgcaccacagctctcccacctctgaggccgaggagttcgtctcccgcctctccacccagaactacttccgctccctgccccgaggcaccagcaacatgacctatgggaccttcaacttcctcgggggccggctgatgatccctaatacaggaatcagcctcctcatccccccagatgccataccccgagggaagatctatgagatctacctcacgctgcacaagccggaagacgtgaggttgcccctagctggctgtcagaccctgctgagtcccatcgttagctgtggaccccctggcgtcctgctcacccggccagtcatcctggctatggaccactgtggggagcccagccctgacagctggagcctgcgcctcaaaaagcagtcgtgcgagggcagctgggaggatgtgctgcacctgggcgaggaggcgccctcccacctctactactgccagctggaggccagtgcctgctacgtcttcaccgagcagctgggccgctttgccctggtgggagaggccctcagcgtggctgccgccaagcgcctcaagctgcttctgtttgcgccggtggcctgcacctccctcgagtacaacatccgggtctactgcctgcatgacacccacgatgcactcaaggaggtggtgcagctggagaagcagctggggggacagctgatccaggagccacgggtcctgcacttcaaggacagttaccacaacctgcgcctatccatccacgatgtgcccagctccctgtggaagagtaagctccttgtcagctaccaggagatccccttttatcacatctggaatggcacgcagcggtacttgcactgcaccttcaccctggagcgtgtcagccccagcactagtgacctggcctgcaagctgtgggtgtggcaggtggagggcgacgggcagagcttcagcatcaacttcaacatcaccaaggacacaaggtttgctgagctgctggctctggagagtgaagcgggggtcccagccctggtgggccccagtgccttcaagatccccttcctcattcggcagaagataatttccagcctggacccaccctgtaggcggggtgccgactggcggactctggcccagaaactccacctggacagccatctcagcttctttgcctccaagcccagccccacagccatgatcctcaacctgtgggaggcgcggcacttccccaacggcaacctcagccagctggctgcagcagtggctggactgggccagccagacgctggcctcttcacagtgtcggaggctgagtgctgaggccggccaggcccgacacctacactctcaccagctttggcacccaccaaggacaggcagaagccggacaggggcccttccccacaccggggagagctgctcggacaggccccctcccggccgaagctgtcccttaatgctggtccttcagaccctgcccgaactcccacctctccatggcctgcctagccaggctggcactgccactcacactcggccccagggcccaggagggacagtgcctggagcctgggccaggcccagcccatctgtgtgtgtgtatgtgcgtgtgatgctacctctcctcccgtccctctccaggggccccgcatacacacggccatgcacgcacacactgggcctgggccagggccccagagctcctgcctgagctggaccttatgcaaacatttctgtgcctgctgggtaggggcacgtctgaggggccctgctccaagcctgcaggaccgagggccacagccggacagggggtagcccctggattcaggcacacgaccaccacacgagcacgtgccacgcatgcctcgtgtgctcatctcacacacacccccctcccgggtcacgcagacaccccccaaccacacacatctcatgccgtacacctgaggctgctcacgtctcacgcccagtgttggtgcacatttgcctctcacatgctgccctctccacccacccagggacaccccacggctcctccctgcccctgcccctcccccagccttgaggtgccctgcccggcggggcctgtgaatatgcaatgggagtcccaggctgtacagtggtgagtgtgtgtgtggcgtggcgtgcccgtccccagggctggctggtgccccacgcggggcctgtcatgtgaagctcgtgtcctgactttgtcttaagtgcattcacgcacttactcttggccttatgtacacagccttgcccggccgccggggcacataggggttttatcgggcgtgaatgtaaataaattatatatatatattgctaaaaaaaaaaaaaaaaaaa

SEQ ID NO: 78 - DNA, 4153 bp, Homo sapien
taaggtaattcgtatgcaagaagctacacgtaattaaatgtgcaggatgaaaagatggcacaggcactgttggtacccccaggacctgaaagcttccgcctttttactagagaatctcttgctgctatcgaaaaacgtgctgcagaagagaaagccaagaagcccaaaaaggaacaagataatgatgatgagaacaaaccaaagccaaatagtgacttggaagctggaaagaaccttccatttatttatggagacattcctccagagatggtgtcagagcccctggaggacctggatccctactatatcaataagaaaacttttatagtaatgaataaaggaaaggcaattttccgattcagtgccacctctgccttgtatattttaactccactaaaccctgttaggaaaattgctatcaagattttggtacattctttattcagcatgcttatcatgtgcactattttgaccaactgtgtatttatgaccttgagcaaccctcctgactggacaaagaatgtagagtacacattcactggaatctatacctttgagtcacttataaaaatcttggtaagagggttttgcttagaagattttacgtttcttcgtgatccatggaactggctggatttcagtgtcattgtgatggcgtatgtaacagaatttgtaagcctaggcaatgtttcagcccttcgaactttcagagtcttgagagctctgaaaactatttctgtaattccaggtttaaagaccattgtgggggccctgatccagtcggtaaagaagctttctgatgtgatgatcctgactgtgttctgtctgagcgtgtttgctctcattgggctgcagctgttcatgggcaatctgaggaataaatgtttgcagtggcccccaagcgattctgcttttgaaaccaacaccacttcctactttaatggcacaatggattcaaatgggacatttgttaatgtaacaatgagcacatttaactggaaggataacattggagatgacagtcacttttatgttttggatgggcaaaaagaccctttactctgtggaaatggttcagatgcaggccagtgtccagaaggatacatctgtgtgaaggctggtcgaaaccccaactatggctacacaagctttgacacctttagctgggctttcctgtctctatttcgactcatgactcaagactactgggaaaatctttaccagttgacattacgtgctgctgggaaaacatacacgatattttttgtcctggtcattttcttgggctcattttatttggtgaatttgatcctggctgtggtggccatggcctatgaggagcagaatcaggccaccttggaagaagcagaacaaaaagaggccgaatttcagcagatgctcgaacagcttaaaaagcaacaggaagaagctcaggcagttgcggcagcatcagctgcttcaagagatttcagtggaataggtgggttaggagagctgttggaaagttcttcagaagcatcaaagttgagttccaaaagtgctaaagaatggaggaaccgaaggaagaaaagaagacagagagagcaccttgaaggaaacaacaaaggagagagagacagctttcccaaatccgaatctgaagacagcgtcaaaagaagcagcttccttttctccatggatggaaacagactgaccagtgacaaaaaattctgctcccctcatcagtctctcttgagtatccgtggctccctgttttccccaagacgcaatagcaaaacaagcattttcagtttcagaggtcgggcaaaggatgttggatctgaaaatgactttgctgatgatgaacacagcacatttgaagacagcgaaacgaggagagactcactgtttgagccgcacagacatggagagcgacgcaacagtaacggcaccaccacagaaacggaggtcagaaagagaaggttaagttcttaccagatttcaatggagatgctggaggattcttctggaaggcaaagagccgtgagcatagccagcattctgaccaacacaatggaagaacttgaagaatctagacagaaatgtccgccatgctggtatagatttgccaatgtgttcttgatctgggactgctgtgatgcatggttaaaagtaaaacatcttgtgaatttaattgttatggatccatttgttgatcttgccatcactatttgcattgtcttaaataccctctttatggccatggagcactaccccatgactgagcaattcagtagtgtgttgactgtaggaaacctggtctttactgggattttcacagcagaaatggttctcaagatcattgccatggatccttattactatttccaagaaggctggaatatctttgatggaattattgtcagcctcagtttaatggagcttggtctgtcaaatgtggagggattgtctgtactgcgatcattcagactgcttagagttttcaagttggcaaaatcctggcccacactaaatatgctaattaagatcattggcaattctgtgggggctctaggaaacctcaccttggtgttggccatcatcgtcttcatttttgctgtggtcggcatgcagctctttggtaagagctacaaagaatgtgtctgcaagatcaatgatgactgtacgctcccacggtggcacatgaacgacttcttccactccttcctgattgtgttccgcgtgctgtgtggagagtggatagagaccatgtgggactgtatggaggtcgctggccaaaccatgtgccttattgttttcatgttggtcatggtcattggaaaccttgtggttctgaacctctttctggccttattgttgagttcatttagctcagacaaccttgctgctactgatgatgacaatgaaatgaataatctgcagattgcagtaggaagaatgcaaaagggaattgattatgtgaaaaataagatgcgggagtgtttccaaaaagccttttttagaaagccaaaagttatagaaatccatgaaggcaataagatagacagctgcatgtccaataatactggaattgaaataagcaaagcgcttaattatcttagagatgggaatggaaccaccagtggtgtaggtactggaagcagtgttgaaaaatacgtaatcgatgaaaatgattatatgtcattcataaacaaccccagcctcaccgtcacagtgccaattgctgttggagagtctgactttgaaaacttaaatactgaagagttcagcagtgagtcagaactagaagaaagcaaagagaaattaaatgcaaccagctcatctgaaggaagcacagttgatgttgttctaccccgagaaggtgaacaagctgaaactgaacccgaagaagaccttaaaccggaagcttgttttactgaaggatgtattaaaaagtttccattctgtcaagtaagtacagaagaaggcaaagggaagatctggtggaatcttcgaaaaacctgctacagtattgttgagcacaactggtttgagactttcattgtgttcatgatccttctcagtagtggtgcattggcctttgaagatatatacattgaacagcgaaagactatcaaaaccatgctagaatatgctgacaaagtctttacctatatattcattctggaaatgcttctcaaatgggttgcttatggatttcaaacatatttcactaatgcctggtgccggctagatttcttgatcgttgatgtttctttggttagcctggtagccaatgctcttggctactcagaactcggtgccatcaaatcattacggacattaagagctttaagacctctaagagccttatcccggtttgaaggcatgagggtggttgtgaatgctcttgttggagcaattccctctatcatgaatgtgctgttggtctgtctcatcttctggttgatctttagcatcatgggtgtgaatttgtttgctggcaagttctaccactgtgttaacatgacaacgggtaacatgtttgacattagtgatgttaacaatttgagtgactgtcaggctcttggcaagcaagctcggtggaaaaacgtgaaagtaaactttgataatgttggcgctggctatcttgcactgcttcaagtggtaagtg

SEQ ID NO: 79 - DNA, 8976 bp, Homo sapien
agcgaagcggaggcataagcagagaggattctggaaaggtctctttgttttcttatccacagagaaagaaagaaaaaaaattgtaactaatttgtaaacctctgtggtcaaaaaaaaaaaaaaaaaaaaagctgaacagctgccagaggaagacacgttataccctaaccatcttggatgctgggctttgttatgctgtaattcataaggctctgttttatcagagattatggagcaagaaaactgaagccaagccacatcaaggtttgacagggatgagatacctgtcaaggattcatagtagagtggcttactgggaaaggagcaaagaatctcttctagggatattgtaagaataaatgagataattcacagaagggacctggagcttttccggaaaaaggtgctgtgactatctaaggtaattcgtatgcaagaagctacacgtaattaaatgtgcaggatgaaaagatggcacaggcactgttggtacccccaggacctgaaagcttccgcctttttactagagaatctcttgctgctatcgaaaaacgtgctgcagaagagaaagccaagaagcccaaaaaggaacaagataatgatgatgagaacaaaccaaagccaaatagtgacttggaagctggaaagaaccttccatttatttatggagacattcctccagagatggtgtcagagcccctggaggacctggatccctactatatcaataagaaaacttttatagtaatgaataaaggaaaggcaattttccgattcagtgccacctctgccttgtatattttaactccactaaaccctgttaggaaaattgctatcaagattttggtacattctttattcagcatgcttatcatgtgcactattttgaccaactgtgtatttatgaccttgagcaaccctcctgactggacaaagaatgtagagtacacattcactggaatctatacctttgagtcacttataaaaatcttggcaagagggttttgcttagaagattttacgtttcttcgtgatccatggaactggctggatttcagtgtcattgtgatggcatatgtgacagagtttgtggacctgggcaatgtctcagcgttgagaacattcagagttctccgagcactgaaaacaatttcagtcattccaggtttaaagaccattgtgggggccctgatccagtcggtaaagaagctttctgatgtgatgatcctgactgtgttctgtctgagcgtgtttgctctcattgggctgcagctgttcatgggcaatctgaggaataaatgtttgcagtggcccccaagcgattctgcttttgaaaccaacaccacttcctactttaatggcacaatggattcaaatgggacatttgttaatgtaacaatgagcacatttaactggaaggattacattggagatgacagtcacttttatgttttggatgggcaaaaagaccctttactctgtggaaatggctcagatgcaggccagtgtccagaaggatacatctgtgtgaaggctggtcgaaaccccaactatggctacacaagctttgacacctttagctgggctttcctgtctctatttcgactcatgactcaagactattgggaaaatctttaccagttgacattacgtgctgctgggaaaacatacatgatattttttgtcctggtcattttcttgggctcattttatttggtgaatttgatcctggctgtggtggccatggcctatgaggagcagaatcaggccaccttggaagaagcagaacaaaaagaggccgaatttcagcagatgctcgaacagcttaaaaagcaacaggaagaagctcaggcagttgcggcagcatcagctgcttcaagagatttcagtggagtaggtgggttaggagagctgttggaaagttcttcagaagcatcaaagttgagttccaaaggtgctaaagaatggaggaaccggaggaagaaaagaagacagagagagcaccttgaaggaaacaacaaaggagagagagacagctttcccaaatccgaatctgaagacagcgtcaaaagaagcagcttccttttctccatggatggaaacagactgaccagtgacaaaaaattctgctcccctcatcagtctctcttgagtatccgtggctccctgttttccccaagacgcaatagcaaaacaagcattttcagtttcagaggtcgggcaaaggatgttggatctgaaaatgactttgctgatgatgaacacagcacatttgaagacagcgaaagcaggagagactcactgtttgtgccgcacagacatggagagcgacgcaacagtaacggcaccaccactgaaacggaagtcagaaagagaaggttaagctcttaccagatttcaatggagatgctggaggattcctctggaaggcaaagagccgtgagcatagccagcattctgaccaacacaatggaagaacttgaagaatctagacagaaatgtccgccatgctggtatagatttgccaatgtgttcttgatctgggactgctgtgatgcatggttaaaagtaaaacatcttgtgaatttaattgttatggatccatttgttgatcttgccatcactatttgcattgtcttaaataccctctttatggccatggagcactaccccatgactgagcaattcagtagtgtgttgactgtaggaaacctggtctttactgggattttcacagcagaaatggttctcaagatcattgccatggatccttattactatttccaagaaggctggaatatctttgatggaattattgtcagcctcagtttaatggagcttggtctgtcaaatgtggagggattgtctgtactgcgatcattcagactgcttagagttttcaagttggcaaaatcctggcccacactaaatatgctaattaagatcattggcaattctgtgggggctctaggaaacctcaccttggtgttggccatcatcgtcttcatttttgctgtggtcggcatgcagctctttggtaagagctacaaagaatgtgtctgcaagatcaatgatgactgtacgctcccacggtggcacatgaacgacttcttccactccttcctgattgtgttccgcgtgctgtgtggagagtggatagagaccatgtgggactgtatggaggtcgctggccaaaccatgtgccttattgttttcatgttggtcatggtcattggaaaccttgtggttctgaacctctttctggccttattattgagttcatttagctcagacaaccttgctgctactgatgatgacaatgaaatgaataatctgcagattgcagtaggaagaatgcaaaagggaattgattatgtgaaaaataagatgcgggagtgtttccaaaaagccttttttagaaagccaaaagttatagaaatccatgaaggcaataagatagacagctgcatgtccaataatactggaattgaaataagcaaagagcttaattatcttagagatgggaatggaaccaccagtggtgtaggtactggaagcagtgttgaaaaatacgtaatcgatgaaaatgattatatgtcattcataaacaaccccagcctcaccgtcacagtgccaattgctgttggagagtctgactttgaaaacttaaatactgaagagttcagcagtgagtcagaactagaagaaagcaaagagaaattaaatgcaaccagctcatctgaaggaagcacagttgatgttgttctaccccgagaaggtgaacaagctgaaactgaacccgaagaagactttaaaccggaagcttgttttactgaagggtgtattaaaaagtttccattctgtcaagtaagtacagaagaaggcaaagggaagatctggtggaatcttcgaaaaacctgctacagtattgttgagcacaactggtttgagactttcattgtgttcatgatccttctcagtagtggtgcattggcctttgaagatatatacattgaacagcgaaagactatcaaaaccatgctagaatatgctgacaaagtctttacctatatattcattctggaaatgcttctcaaatgggttgcttatggatttcaaacatatttcactaatgcctggtgctggctagatttcttgatcgttgatgtttctttggttagcctggtagccaatgctcttggctactcagaactcggtgccatcaaatcattacggacattaagagctttaagacctctaagagccttatcccggtttgaaggcatgagggtggttgtgaatgctcttgttggagcaattccctctatcatgaatgtgctgttggtctgtctcatcttctggttgatctttagcatcatgggtgtgaatttgtttgctggcaagttctaccactgtgttaacatgacaacgggtaacatgtttgacattagtgatgttaacaatttgagtgactgtcaggctcttggcaagcaagctcggtggaaaaacgtgaaagtaaactttgataatgttggcgctggctatcttgcactgcttcaagtggccacatttaaaggctggatggatattatgtatgcagctgttgattcacgagatgttaaacttcagcctgtatatgaagaaaatctgtacatgtatttatactttgtcatctttatcatctttgggtcattcttcactctgaatctattcattggtgtcatcatagataacttcaaccagcagaaaaagaagtttggaggtcaagacatctttatgacagaggaacagaaaaaatattacaatgcaatgaagaaacttggatccaagaaacctcagaaacccatacctcgcccagcaaacaaattccaaggaatggtctttgattttgtaaccagacaagtctttgatatcagcatcatgatcctcatctgcctcaacatggtcaccatgatggtggaaacggatgaccagggcaaatacatgaccctagttttgtcccggatcaacctagtgttcattgttctgttcactggagaatttgtgctgaagctcgtttccctcagacactactacttcactataggctggaacatctttgactttgtggtggtgattctctccattgtaggtatgtttctggctgagatgatagaaaagtattctgtgtcccctaccttgttccgagtgatccgtcttgccaggattggccgaatcctacgtctgatcaaaggagcaaaggggatccgcacgctgctctttgctttgatgatgtcccttcctgcgttgtttaacatcggcctcctgctcttcctggtcatgtttatctatgccatctttgggatgtccaactttgcctatgttaaaaaggaagctggaattgatgacatgttcaactttgagacctttggcaacagcatgatctgcttgttccaaattacaacctctgctggctgggatggattgctagcacctattcttaatagtgcaccacccgactgtgaccctgacacaattcaccctggcagctcagttaagggagaccgtggggacccatctgttgggattttcttttttgtcagttacatcatcatatccttcctggttgtggtgaacatgtacatcgcggtcatcctggagaacttcagtgttgctactgaagaaagtgcagagcccctgagtgaggatgactttgagatgttctatgaggtttgggaaaagtttgatcccgatgcgacccagtttatagagttctctaaactctctgattttgcagctgccctggatcctcctcttctcatagcaaaacccaacaaagtccagcttattgccatggatctgcccatggtcagtggtgaccggatccactgtcttgatattttatttgcctttacaaagcgtgttttgtgtgagagtggagagatggatgcccttcgaatacagatggaagacaggtttatggcatcaaacccctccaaagtctcttatgagcctattacaaccactttgaaacgtaaacaagaggaggtgtctgccgctatcattcagcgtaatttcagatgttatcttttaaagcaaaggttaaaaaatatatcaagtaactataacaaagaggcaattaaagggaggattgacttacctataaaacaagacatgattattgacaaactaaatgggaactccactccagaaaaaacagatgggagttcctctaccacctctcctccttcctatgatagtgtaacaaaaccagacaaggaaaagtttgagaaagacaaaccagaaaaagaaagcaaaggaaaagaggtcagagaaaatcaaaagtaaaaagaaacaaagaattatctttgtgatcaattgtttacagcctatgaaggtaaagtatatgtgtcaactggacttcaagaggaggtccatgccaaactgactgttttaacaaatactcatagtcagtgcctatacaagacagtgaagtgacctctctgtcactgcaactctgtgaagcagggtatcaacgttgacaagaggttgctgtttttattaccagctgacactgctgaggagaaacccaatggctacctagactatagggatagttgtgcaaagtgaacattgtaactacaccaaacacctttagtacagtccttgcatccattctatttttaacttccatatctgccatatttttacaaaatttgttctagtgcatttccatggtccccaattcatagtttattcataatgctatgtcactatttttgtaaatgaggtttacgttgaagaaacagtatacaagaaccctgtctctcaaatgatcagacaaaggtgttttgccagagagataaaatttttgctcaaaaccagaaaaagaattgtaatggctacagtttcagttacttccattttctagatggctttaattttgaaagtattttagtctgttatgtttgtttctatctgaacagttatgtgcctgtaaagtctcctctaatatttaaaggattatttttatgcaaagtattctgtttcagcaagtgcaaattttattctaagtttcagagctctatatttaatttaggtcaaatgctttccaaaaagtaatctaataaatccattctagaaaaatatatctaaagtattgctttagaatagttgttccactttctgctgcagtattgctttgccatcttctgctctcagcaaagctgatagtctatgtcaattaaataccctatgttatgtaaatagttattttatcctgtggtgcatgtttgggcaaatatatatatagcctgataaacaacttctattaaatcaaatatgtaccacagtgtatgtgtcttttgcaagcttccaacagggatgtatcctgtatcattcattaaacatagtttaaaggctatcactaatgcatgttaatattgcctatgctgctctattttactcaatccattcttcacaagtcttggttaaagaatgtcacatattggtgatagaatgaattcaacctgctctgtccattatgtcaagcagaataatttgaagctatttacaaacacctttacttttgcacttttaattcaacatgagtatcatatggtatctctctggatttcaaggaaacacactggatactgcctactgacaaaacctattcttcatattttgctaaaaatatgtctaaaacttgtttaaatataaataatgtaaaaatataatcaactttatttgtcagcattttgtacataagaaaattattttcaggttgatgacatcacaatttattttactttatgcttttgcttttgatttttaatcacaattccaaacttttgaatccataagatttttcaatggataatttcctaaaataaaagttagataatgggttttatggatttctttgttataatatattttctaccattccaataggagatacattggtcaaacactcaaacctagatcattttctaccaactatggttgcctcaatataaccttttattcatagatgtttttttttattcaacttttgtagtatttacgtatgcagactagtcttatttttttaattcctgctgcactaaagctattacaaatataacatggactttgttctttttagccatgaacaaagtggcaaagttgtgcaattacctaacatgatataaatttttgttttttgcacaaaccaaaagtttaatgttaattctttttacaaaactatttactgtagtgtattgaagaactgcatgcagggaattgctattgctaaaaagaatggtgagctacgtcattattgagccaaaagaataaatttcattttttattgcatttcacttattgggctctggggttttttgtttttgttttttgctgttggcagtttaaaatatatataattaataaaacctgtgcttgatctgacatttgtatacataaaagtttacatgaattttacaacaaactagtgcatgattcaccaagcagtactacagaacaaaggcaaattaaaagcagctttgtgaacttttatgtgtgcaaaggatcaagttcacatgttccaactttcaggtttgataataatagtagtaaccacctacaatagctttcaatttcaattaactcccttggctataagcatctaaactcatcttctttcaatataattgatgctatctcctaattacttggtggctaataaatgttacattctttgttacttaaatgcattatataaactcctatgtatacataaggtattaatgatatagttattgagaatttatattaacttttttttcaagaacccttggatttatgtgaggtcaaaaccaaactcttattctcagtggaaaactccagttgtaatgcatatttttaaagacaatttggatctaaatatgtatttcataattctcccataataaattatataaggtggaaaaaaaaaaaaaaaaaaaaaaaaaaaaa

SEQ ID NO: 80 - DNA, 1672 bp, Homo sapien
aaaaaaattaaaaaaaaaaaaaaaaacagaaaaaaaaacatagtacatgccaagatattattatgacaattacaaatacaaataaattatgatctttgacctcagcatatttattaactaaaagggaagataaaacaggcacataactataacaggggcaccagtcatgggcgccgcagccgctcaggcgcctctcgggctgcctgcggcctccgctcgccttctgctgctagcgacgtcggtgcttctgctcttcgccttctctctgcccgggagccgcgcgtccaaccagcccccgggtggtggcggcggcacgggcggggactgtcccggcggcaaaggcaagagcatcaactgctcagaattaaatgtgagggagtctgacgtaagagtttgtgatgagtcatcatgtaaatatggaggagtctgtaaagaagatggagatggtttgaaatgtgcatgccaatttcagtgccatacaaattatattcctgtctgtggatcaaatggggacacttatcaaaatgaatgctttctcagaagggctgcttgtaagcaccagaaagagataacagtaatagcaagaggaccatgctactctgataatggatctggatctggagaaggagaagaggaagggtcaggggcagaagttcacagaaaacactccaagtgtggaccctgcaaatataaagctgagtgtgatgaagatgcagaaaatgttgggtgtgtatgtaatatagattgcagtggatacagttttaatcctgtgtgtgcttctgatgggagttcctataacaatccctgttttgttcgagaagcatcttgtataaagcaagaacaaattgatataaggcatcttggtcattgcacagatacagatgacactagtttgttgggaaagaaagatgatggactacaatatcgaccagatgtgaaagatgctagtgatcaaagagaagatgtttatattggaaaccacatgccttgccctgaaaacctcaatggttactgcatccatggaaaatgtgaattcatctatctactcagaagggcttcttgtagatgtgaatctggctacactggacagcactgtgaaaagacagactttagtattctctatgtagtgccaagtaggcaaaagctcactcatgttcttattgcagcaattattggagctgtacagattgccatcatagtagcaattgtaatgtgcataacaagaaaatgccccaaaaacaatagaggacgtcgacagaagcaaaacctaggtcattttacttcagatacgtcatccagaatggtttaaactgatgacttttatatgtacactgaccatgtgtatgtacatttattatgtctttttttaaagaatggaaatatttatttcagaaggccttatttttggacattttatagtgtagtactgttggctcgatatttgaatattcagctacgacagttttggactgtttagtagtctttgttttatgtttttaaatacagaaattgcttcacaaatttgtaccacatggtaattctaagacttgttctttacccatggaatgtaatatttttgcaaagatggactacttcacaaatggttataaagtcatatccacttcttccacaatgaccacagcaaatgacccaagcatgaactaaagaagag

SEQ ID NO: 81 - DNA, 2091 bp, Homo sapien
cgccagcatgctgccggagcagctctacttcctgcagagccccccggaggaggagcccgaataccaccccgacgcctcagcccaagaattaaatgtgagggagtctgacgtaagagtttgtgatgagtcatcatgtaaatatggaggagtctgtaaagaagatggagatggtttgaaatgtgcatgccaatttcagtgccatacaaattatattcctgtctgtggatcaaatggggacacttatcaaaatgaatgctttctcagaagggctgcttgtaagcaccagaaagagataacagtaatagcaagaggaccatgctactctgataatggatctggatctggagaaggagaagaggaagggtcaggggcagaagttcacagaaaacactccaagtgtggaccctgcaaatataaagctgagtgtgatgaagatgcagaaaatgttgggtgtgtatgtaatatagattgcagtggatacagttttaatcctgtgtgtgcttctgatgggagttcctataacaatccctgttttgttcgagaagcatcttgtataaagcaagaacaaattgatataaggcatcttggtcattgcacagatacagatgacactagtttgttgggaaagaaagatgatggactacaatatcgaccagatgtgaaagatgctagtgatcaaagagaagatgtttatattggaaaccacatgccttgccctgaaaacctcaatggttactgcatccatggaaaatgtgaattcatctattctactcagaaggcttcttgtagatgtgaatctggctacactggacagcactgtgaaaagacagactttagtattctctatgtagtgccaagtaggcaaaagctcactcatgttcttattgcagcaattattggagctgtacagattgccatcatagtagcaattgtaatgtgcataacaagaaaatgccccaaaaacaatagaggacgtcgacagaagcaaaacctaggtcattttacttcagatacgtcatccagaatggtttaaactgatgacttttatatgtacactgaccatgtgatgtacatttattatgtctttttttaaagaatggaaatatttatttcagaggccttatttttggacatttttagtgtagtactgttggctcgtatttagaatattcagctacgacagttttggactgtttagtagtctttgttttatgtttttaaatacagaaattgctttcacaaatttgtaccacatggtaattctaagacttgttctttacccatggaatgtaatatttttgcaaagatggactacttcacaaatggttataaagtcatatccacttcttccacaatgaccacagcaaatgaccaagcatgaactaaaggtaaagatgtttacagattacttttcttacaaaaaaaatctagaagacactgtgtttaaatagatatttaaatgtttttgagatttagtaactgattttttagacactgcctatcgcatgaactgtaaagctgtgtgtattaggtgtaaaatatttataagatatatggactggggaatttgattattcctccctttgaaaaaatagtcctaataatttgaacaaatatgttagtaatgatggaacagatcaatgaaaagtagatatagatattgtgaaaataggctgtttaacaaacagattggaataaagcctattctaccagttaaactactttaatacacattcatttttaaagaaaatgtttgttttaacataaataaacaaatcgtatcagtgtttgtgaataaaatacaaaaatgattgttaatgattggtgctcttaaagtgagcttaaaatttatccaagacgtatatccaaatttgtcctgtagtaatagattaatattcatagattgttggtgtttaaagatctgaagtgtgagtagaatgtattcagctgtttaacatgtagtttagatattcaaaagtatgcatgtagaatttaaagaatatgttaaaaattattaattttaatattttgtttggaaaagcatgttataatataatgttttcactataaagaaaaaaaaaaaaaaaaaaa

SEQ ID NO: 82 - protein, 554 aa, Homo sapien
MPTVDDILEQVGESGWFQKQAFLILCLLSAAFAPICVGIVFLGFTPDHHCQSPGVAELSQRCGWSPAEELNYTVPGLGPAGEAFLGQCRRYEVDWNQSALSCVDPLASLATNRSHLPLGPCQDGWVYDTPGSSIVTEFNLVCADSWKLDLFQSCLNAGFLFGSLGVGYFADRFGRKLCLLGTVLVNAVSGVLMAFSPNYMSMLLFRLLQGLVSKGNWMAGYTLITEFVGSGSRRTVAIMYQMAFTVGLVALTGLAYALPHWRWLQLAVSLPTFLFLLYYWCVPESPRWLLSQKRNTEAIKIMDHIAQKNGKLPPADLKMLSLEEDVTEKLSPSFADLFRTPRLRKRTFILMYLWFTDSVLYQGLILHMGATSGNLYLDFLYSALVEIPGAFIALITIDRVGRIYPMAMSNLLAGAACLVMIFISPDLHWLNIIIMCVGRMGITIAIQMICLVNAELYPTFVRNLGVMVCSSLCDIGGIITPFIVFRLREVWQALPLILFAVLGLLAAGVTLLLPETKGVALPETMKDAENLGRKAKPKENTIYLKVQTSEPSGT

SEQ ID NO: 83 - protein, 527 aa, Homo sapien
MRSDKSALVFLLLQLFCVGCGFCGKVLVWPCDMSHWLNVKVILEELIVRGHEVTVLTHSKPSLIDYRKPSALKFEVVHMPQDRTEENEIFVDLALNVLPGLSTWQSVIKLNDFFVEIRGTLKMMCESFIYNQTLMKKLQETNYDVMLIDPVIPCGDLMAELLAVPFVLTLRISVGGNMERSCGKLPAPLSYVPVPMTGLTDRMTFLERVKNSMLSVLFHFWIQDYDYHFWEEFYSKALGRPTTLCETVGKAEIWLIRTYWDFEFPQPYQPNFEFVGGLHCKPAKALPKEMENFVQSSGEDGIVVFSLGSLFQNVTEEKANIIASALAQIPQKVLWRYKGKKPSTLGANTRLYDWIPQNDLLGHPKTKAFITHGGMNGIYEAIYHGVPMVGVPIFGDQLDNIAHMKAKGAAVEINFKTMTSEDLLRALRTVITDSSYKENAMRLSRIHHDQPVKPLDRAVFWIEFVMRHKGAKHLRSAAHDLTWFQHYSIDVIGFLLTCVATAIFLFTKCFLFSCQKFNKTRKIEKRE

SEQ ID NO: 84 - protein, 469 aa, Homo sapien
MQADARAFFAQDGVQSLLTQKWWGDMASTTPIWALVLAFFCPPLIYTRLITFRKSEEEPTREELEFDMDSVINGEGPVGTADPAEKTPLGVPRQSGRPGCCGGRCGGRRCLRRWFHFWGAPVTIFMGNVVSYLLFLLLFSRVLLVDFQPAPPGSLELLLYFWAFTLLCEELRQGLSGGGGSLASGGPGPGHASLSQRLRLYLADSWNQCDLVALTCFLLGVGCRLTPGLYHLGRTVLCIDFMVFTVRLLHIFTVNKQLGPKIVIVSKMMKDVFFFLFFLGVWLVAYGVATEGLLRPRDSDFPSILRRVFYRPYLQIFGQIPQEDMDVALMEHSNCSSEPGFWAHPPGAQAGTCVSQYANWLVVLLLVIFLLVANILLVNLLIAMFSYTFGKVQGNSDLYWKAQVTASSGNSTLGPRWPRPLSSSPTCASCSGNCAGDPGAPSRPPRPSSISGFTFLRKPSGSANVGIGA

SEQ ID NO: 85 - protein, 320 aa, Homo sapien [sequence omitted]

SEQ ID NO: 86 - protein, 801 aa, Homo sapien
MERLWGLFQRAQQLSPRSSQTVYQRVEGPRKGHLEEEEEDGEEGAETLAHFCPMELRGPEPLGSRPRQPNLIPWAAAGRRAAPYLVLTALLIFTGAFLLGYVAFRGSCQACGDSVLVVSEDVNYEPDLDFHQGRLYWSDLQAMFLQFLGEGRLEDTIRQTSLRERVAGSAGMAALTQDIRAALSRQKLDHVWTDTHYVGLQFPDPAHPNTLHWVDEAGKVGEQLPLEDPDVYCPYSAIGNVTGELVYAHYGRPEDLQDLRARGVDPVGRLLLVRVGVISFAQKVTNAQDFGAQGVLIYPEPADFSQDPPKPSLSSQQAVYGHVHLGTGDPYTPGFPSFNQTQFPPVASSGLPSIPAQPISADIASRLLRKLKGPVAPQEWQGSLLGSPYHLGPGPRLRLVVNNHRTSTPINNIFGCIEGRSEPDHYVVIGAQRDAWGPGAAKSAVGTAILLELVRTFSSMVSNGFRPRRSLLFISWDGGDFGSVGSTEWLEGYLSVLHLKAVVYVSLDNAVLGDDKFHAKTSPLLTSLIESVLKQVDSPNHSGQTLYEQVVFTNPSWDAEVIRPLPMDSSAYSFTAFVGVPAVEFSFMEDDQAYPFLHTKEDTYENLHKVLQGRLPAVAQAVAQLAGQLLIRLSHDRLLPLDFGRYGDVVLRHIGNLNEFSGDLKARGLTLQWVYSARGDYIRAAEKLRQEIYSSEERDERLTRMYNVRIMRVEFYFLSQYVSPADSPFRHIFMGRGDHTLGALLDHLRLLRSNSSGTPGATSSTGFQESRFRRQLALLTWTLQGAANALSGDVWNIDNNF

SEQ ID NO: 87 - protein, 318 aa, Homo sapien
MVELMFPLLLLLLPFLLYMAAPQIRKMLSSGVCTSTVQLPGKVVVVTGANTGIGKETAKELAQRGARVYLACRDVEKGELVAKEIQTTTGNQQVLVRKLDLSDTKSIRAFAKGFLAEEKHLHVLINNAGVMMCPYSKTADGFEMHIGVNHLGHFLLTHLLLEKLKESAPSRIVNVSSLAHHLGRIHFHNLQGEKFYNAGLAYCHSKLANILFTQELARRLKGSGVTTYSVHPGTVQSELVRHSSFMRWMWWLFSFFIKTPQQGAQTSLHCALTEGLEILSGNHFSDCHVAWVSAQARNETIARRLWDVSCDLLGLPID

SEQ ID NO: 88 - protein, 131 aa, Homo sapien
MKIFLPVLLAALLGVERASSLMCFSCLNQKSNLYCLKPTICSDQDNYCVTVSASAGIGNLVTFGHSLSKTCSPACPIPEGVNVGVASMGISCCQSFLCNFSAADGGLRASVTLLGAGLLLSLLPALLRFGP

SEQ ID NO: 89 - protein, 343 aa, Homo sapien
  Unsure 233, 328, 333: Unknown amino acid
MLLLKKHTEDISSVYEIRERLGSGAFSEVVLAQERGSAHLVALKCIPKKALRGKEALVENEIAVLRRISHPNIVALEDVHESPSHLYLAMELVTGGELFDRIMERGSYTEKDASHLVGQVLGAVSYLHSLGIVHRDLKPENLLYATPFEDSKIMVSDFGLSKIQAGNMLGTACGTPGYVAPELLEQKPYGKAVDVWALGVISYILLCGYPPFYDESDPELFSQILRASYEFDXPFWDDISESGKDFIRHLLERDLQKRFTCQQALRDLWIFWDTGFGRDILGFVSEQIRKNFAWTHWKRAFNATLFLRHIRKLGQIPEGEGASEQGMXRHSHXGLRAGQPPKW

SEQ ID NO: 90 - protein, 911 aa, Homo sapien [sequence omitted]

SEQ ID NO: 91 - protein, 387 aa, Homo sapien
MVAWVVSTGVAIACCAAVYYLAEYNLEFLKTHSNPGAVLLLPFVVSCINLAVPCIYSMFRLVERYEMPRHEVYVLLIRNIFLKISIIGILCYYWLNTVALSGEECWETLIGQDIYRLLLMDFVFSLVNSFLGEFLRRIIGMQLITSLGLQEFDIARNVLELIYAQTLVWIGIFFCPLLPFIQMIMLFIMFYSKNISLMMNFQPPSKAWRASQMMTFFIFLLFFPSFTGVLCTLAITIWRLKPSADCGPFRGLPLFIHSIYSWIDTLSTRPGYLWVVWIYRNLIGSVHFFFILTLIVLIITYLYWQITEGRKIMIRLLHEQIINEGKDKMFLIEKLIKLQDMEKKANPSSLVLERREVEQQGFLHLGEHDGSLDLRSRRSVQEGNPRA

SEQ ID NO: 92 - protein, 509 aa, Homo sapien
MERRRLWGSIQSRYISMSVWTSPRRLVELAGQSLLKDEALAIAALELLPRELFPPLFMAAFDGRHSQTLKAMVQAWPFTCLPLGVLMKGQHLHLETFKAVLDGLDVLLAQEVRPRRWKLQVLDLRKNSHQDFWTVWSGNRASLYSFPEPEAAQPMTKKRKVDGLSTEAEQPFIPVEVLVDLFLKEGACDELFSYLIEKVKRKKNVLRLCCKKLKIFAMPMQDIKMILKMVQLDSIEDLEVTCTWKLPTLAKFSPYLGQMINLRRLLLSHIHASSYISPEKEEQYIAQFTSQFLSLQCLQALYVDSLFFLRGRLDQLLRHVMNPLETLSITNCRLSEGDVMHLSQSPSVSQLSVLSLSGVMLTDVSPEPLQALLERASATLQDLVFDECGITDDQLLALLPSLSHCSQLTTLSFYGNSISISALQSLLQHLIGLSNLTHVLYPVPLESYEDIHGTLHLERLAYLHARLRELLCELGRPSMVWLSANPCPHCGDRTFYDPEPILCPCFMPN

SEQ ID NO: 93 - protein, 943 aa, Homo sapien [sequence omitted]

SEQ ID NO: 94 - protein, 492 aa, Homo sapien
MALNSGSPPAIGPYYENHGYQPENPYPAQPTVVPTVYEVHPAQYYPSPVPQYAPRVLTQASNPVVCTQPKSPSGTVCTSKTKKALCITLTLGTFLVGAALAAGLLWKFMGSKCSNSGIECDSSGTCINPSNWCDGVSHCPGGEDENRCVRLYGPNFILQMYSSQRKSWHPVCQDDWNENYGRAACRDMGYKNNFYSSQGIVDDSGSTSFMKLNTSAGNVDIYKKLYHSDACSSKAVVSLRCLACGVNLNSSRQSRIVGGESALPGAWPWQVSLHVQNVHVCGGSIITPEWIVTAAHCVEKPLNNPWHWTAFAGILRQSFMFYGAGYQVQKVISHPNYDSKTKNNDIALMKLQKPLTFNDLVKPVCLPNPGMMLQPEQLCWISGWGATEEKGKTSEVLNAAKVLLIETQRCNSRYVYDNLITPAMICAGFLQGNVDSCQGDSGGPLVTSNNNIWWLIGDTSWGSGCAKAYRPGVYGNVMVFTDWIYRQMKANG

SEQ ID NO: 95 - protein, 253 aa, Homo sapien
MARSLLLPLQILLLSLALETAGEEAQGDKIIDGAPCARGSHPWQVALLSGNQLHCGGVLVNERWVLTAAHCKMNEYTVHLGSDTLGDRRAQRIKASKSFRHPGYSTQTHVNDLMLVKLNSQARLSSMVKKVRLPSRCEPPGTTCTVSGWGTTTSPDVTFPSDLMCVDVKLISPQDCTKVYKDLLENSMLCAGIPDSKKNACNGDSGGPLVCRGTLQGLVSWGTFPCGQPNDPGVYTQVCKFTKWINDTMKKHR

SEQ ID NO: 96 - protein, 339 aa, Homo sapien
MESRKDITNQEELWKMKPRRNLEEDDYLHKDTGETSMLKRPVLLHLHQTAHADEFDCPSELQHTQELFPQWHLPIKIAAIIASLTFLYTLLREVIHPLATSHQQYFYKIPILVINKVLPMVSITLLALVYLPGVIAAIVQLHNGTKYKKFPHWLDKWMLTRKQFGLLSFFFAVLHAIYSLSYPMRRSYRYKLLNWAYQQVQQNKEDAWIEHDVWRMEIYVSLGIVGLAILALLAVTSIPSVSDSLTWREFHYIQSKLGIVSLLLGTIHALIFAWNKWIDIKQFVWYTPPTFMIAVFLPIVVLIFKSILFLPCLRKKILKIRHGWEDVTKINKTEICSQL

SEQ ID NO: 97 - protein, 420 aa, Homo sapien
MDSSPSLPLIRTPESSLHEALDQCMTALDLFLTNQFSEALSYLKPRTKESMYHSLTYATILEMQAMMTFDPQDILLAGNMMKEAQMLCQRHRRKSSVTDSFSSLVNRPTLGQFTEEEIHAEVCYAECLLQRAALTFLQGSSHGGAVRPRALHDPSHACSCPPGPGRQHLFLLQDENMVSFIKGGIKVRNSYQTYKELDSLVQSSQYCKGENHPHFEGGVKLGVGAFNLTLSMLPTRILRLLEFVGFSGNKDYGLLQLEEGASGHSFRSVLCVMLLLCYHTFLTFVLGTGNVNIEEAEKLLKPYLNRYPKGAIFLFFAGRIEVIKGNIDAVSDGGPGRGWGSLGVSQTSRKSGTCDILRDRIDWGRGGGQERTNQRAGAGEALLAEQPGKTREEEAFVVPGILTGRYRTAALQWREVEGGA

SEQ ID NO: 98 - protein, 514 aa, Homo sapien
MADAEVIILPKKHKKKKERKSLPEEDVAEIQHAEEFLIKPESKVAKLDTSQWPLLLKNFDKLNVRTTHYTPLACGSNPLKREIGDYIRTGFINLDKPSNPSSHEVVAWIRRILRVEKTGHSGTLDPKVTGCLIVCIERATRLVKSQQSAGKEYVGIVRLHNAIEGGTQLSRALETLTGALFQRPPLIAAVKRQLRVRTIYESKMIEYDPERRLGIFWVSCEAGTYIRTLCVHLGLLLGVGGQMQELRRVRSGVMSEKDHMVTMHDVLDAQWLYDNHKDESYLRRVVYPLEKLLTSHKRLVMKDSAVNAICYGAKIMLPGVLRYEDGIEVNQEIVVITTKGEAICMAIALMTTAVISTCDHGIVAKIKRVIMERDTYPRKWGLGPKASQKKLMIKQGLLDKHGKPTDSTPATWKQEYVDYSESAKKEVVAEVVKAPQVVAEAAKTAKRKRESESESDETPPAAPQLIKKEKKKSKKDKKAKAGLESGAEPGDGDSDTTKKKKKKKKAKEVELVSE

SEQ ID NO: 99 - protein, 313 aa, Homo sapien
MALRICVTYTPALPIGLCTRCCLCLEQSPSWCHCLRGVSFLTFHLHQSVPLGDRDSLLMFTRQAGHFVEGSKAGRSRGRLCLSQALRVAVRGAFVSLWFAAGAGDRERNKGDKGAQTGAGLSQEAEDVDVSRARRVTDAPQGTLCGTGNRNSGSQSARAVGVAHLGEAFRVGVEQAISSCPEEVHGRHGLSMEIMWARMDVALRSPGRGLLAGAGALCVTLAESSCPDYERGRRACLTLHRHPTPHCSTWGLPLRVAGSWLTVVTVEALGGWRMGVRRTGQVGPTMHPPPVSGASPLLLHHLLLLLLIIILTC

SEQ ID NO: 100 - protein, 132 aa, Homo sapien
MGIVANFQELAVPVVHDGGALLAFVCGVVYTLLQSIISYKSCPQWNSLSTCHIRMVISAVSCAAVIPMIVCASLISITKLEWNPREKDYVYHVVSAICEWTVAFGFIFYFLTFIQDFQSVTLRISTEINGDI

SEQ ID NO: 101 - protein, 416 aa, Homo sapien
MPRQLSAAAALFASLAVILHDGSQMRAKAFPETRDYSQPTAAATVQDIKKPVQQPAKQAPHQTLAARFMDGHITFQTAATVKIPTTTPATTKNTATTSPITYTLVTTQATPNNSHTAPPVTEVTVGPSLAPYSLPPTITPPAHTAGTSSSTVSHTTGNTTQPSNQTTLPATLSIALHKSTTGQKPDQPTHAPGTTAAAHNTTRTAAPASTVPGPTLAPQPSSVKTGIYQVLNGSRLCIKAEMGIQLIVQDKESVFSPRRYFNIDPNATQASGNCGTRKSNLLLNFQGGFVNLTFTKDEESYYISEVGAYLTVSDPETVYQGIKHAVVMFQTAVGHSFKCVSEQSLQLSAHLQVKTTDVQLQAFDFEDDHFGNVDECSSDYTIVLPVIGAIVVGLCLMGMGVYKIRLRCQSSGYQRI

SEQ ID NO: 102 - protein, 134 aa, Homo sapien
MTEEPIKEILGAPKAHMAATMEKSPKSEVVITTVPLVSEIQLMAATGGTELSCYRCIIPFAVVVFIAGIVVTAVAYSFNSHGSIISIFGLVVLSSGLFLLASSALCWKVRQRSKKAKRRESQTALVANQRSLFA

SEQ ID NO: 103 - protein, 318 aa, Homo sapien
MLSLLHASTLAVLGALCVYGAGHLEQPQISSTKTLSKTARLECVVSGITISATSVYWYRERPGEVIQFLVSISYDGTVRKESGIPSGKFEVDRIPETSTSTLTIHNVEKQDIATYYCALWEVRLANQELGKKIKVFGPGTKLIITDKQLDADVSPKPTIFLPSIAETKLQKAGTYLCLLEKFFPDVIKIHWQEKKSNTILGSQEGNTMKTNDTYMKFSWLTVPEKSLDKEHRCIVRHENNKNGVDQEIIFPPIKTDVITMDPKDNCSKDANDTLLLQLTNTSAYYTYLLLLLKSVVYFAIITCCLLRRTAFCCNGEKS

SEQ ID NO: 104 - protein, 440 aa, Homo sapien
MNYSLHLAFVCLSLFTERMCIQGSQFNVEVGRSDKLSLPGFENLTAGYNKFLRPNFGGEPVQIALTLDIASISSISESNMDYTATIYLRQRWMDQRLVFEGNKSFTLDARLVEFLWVPDTYIVESKKSFLHEVTVGNRLIRLFSNGTVLYALRITTTVACNMDLSKYPMDTQTCKLQLESWGYDGNDVEFTWLRGNDSVRGLEHLRLAQYTIERYFTLVTRSQQETGNYTRLVLQFELRRNVLYFILETYVPSTFLVVLSWVSFWISLDSVPARTCIGVTTVLSMTTLMIGSRTSLPNTNCFIKAIDVYLGICFSFVFGALLEYAVAHYSSLQQMAAKDRGTTKEVEEVSITNIINSSISSFKRKISFASIEISSDNVDYSDLTMKTSDKFKFVFREKMGRIVDYFTIQNPSNVDHYSKLLFPLIFMLANVFYWAYYMYF

SEQ ID NO: 105 - protein, 508 aa, Homo sapien
MILVLLCAFLIPCPPRDLHSTWSRHLGSQGGGDLSPLELADVNGDGLRDVLLSFVMSRNGSAVGVSRPAANLVCLSGMNGSTLWSSLLPEEARDITCLELMPGSLAETICLVTGTHKMLSAFNATSGKAIWTLNPNYLSNGTLAAPVVVLPDLDEDGVRDLVVLAIGELQPDLCFLLVSGRTGNPVGRPVKYNIVGVGNLIGPQVYITTNGAVYILFGFGNIQAVALRDIFVQAQNRDSSPPSLQIEEPEWEKRRSINLSELIDVYSDGVELLQMVKAPDSNCSNLLITTRQSLVLLRGQNLTPYWALRLQGLRSQPTPGYFTDDQTLDFLLQIQDGVGMKKMMVVDGDSGSIVWSYRAPCHMKETPATSAVTSDQKSVFLFWAEGLSAASPNSDIILGTEPPSLHHLYLLHPAFPSILLDLANTTGTVTASEVGINDLWKDAFYVTRTTGPSSEGHPAALVVSKLSLRWALMEGQMAQLQESTPKIGRGELRRFLSRIKFVEAPYEI

SEQ ID NO: 106 - protein, 132 aa, Homo sapien
MSNKFLGTWKLVSSENFDDYMKALGVGLATRKLGNLAKPTVIISKKGDIITIRTESTFKNTEISFKLGQEFEETTADNRKTKSIVTLQRGSLNQVQRWDGKETTIKRKLVNGKMVAECKMKGVVCTRIYEKV

SEQ ID NO: 107 - protein, 518 aa, Homo sapien
MGALARALLLPLLAQWLLRAAPELAPAPFTLPLRVAAATNRVVAPTPGPGTPAERHADGLALALEPALASPAGAANFLAMVDNLQGDSGRGYYLEMLIGTPPQKLQILVDTGSSNFAVAGTPHSYIDTYFDTERSSTYRSKGFDVTVKYTQGSWTGFVGEDLVTIPKGFNTSFLVNIATIFESENFFLPGIKWNGILGLAYATLAKPSSSLETFFDSLVTQANIPNVFSMQMCGAGLPVAGSGTNGGSLVLGGIEPSLYKGDIWYTPIKEEWYYQIEILKLEIGGQSLNLDCREYNADKAIVDSGTTLLRLPQKVFDAVVEAVARASLIPEFSDGFWTGSQLACWTNSETPWSYFPKISIYLRDENSSRSFRITILPQLYIQPMMGAGLNYECYRFGISPSTNALVIGATVMEGFYVIFDRAQKRVGFAASPCAEIAGAAVSEISGPFSTEDVASNCVPAQSLSEPILWIVSYALMSVCGAILLVLIVLLLLPFRCQRRPRDPEVVNDESSLVRHRWK

SEQ ID NO: 108 - protein, 440 aa, Homo sapien [sequence omitted]

SEQ ID NO: 109 - protein, 90 aa, Homo sapien
MKFLAVLVLLGVSIFLVSAQNPTTAAPADTYPATGPADDEAPDAETTAAATTATTAAPTTATTAASTTARKDIPVLPKWVGDLPNGRVCP

SEQ ID NO: 110 - protein, 256 aa, Homo sapien
MFQTGGLIVFYGLLAQTMAQFGGLPVPLDQTLPLNVNPALPLSPTGLAGSLTNALSNGLLSGGLLGILENLPLLDILKPGGGTSGGLLGGLLGKVTSVIPGLNNIIDIKVTDPQLLELGLVQSPDGHRLYVTIPLGIKLQVNTPLVGASLLRLAVKLDITAEILAVRDKQERIHLVLGDCTHSPGSLQISLLDGLGPLPIQGLLDSLTGILNKVLPELVQGNVCPLVNEVLRGLDITLVHDIVNMLIHGLQFVIKV

SEQ ID NO: 111 - protein, 775 aa, Homo sapien [sequence omitted]

SEQ ID NO: 112 - protein, 529 aa, Homo sapien
MGPSCPVFLSFTKLSLWWLLLTPAGGEEAKRPPPRAPGDPLSSPSPTALPQGGSHTETEDRLFKHLFRGYNRWARPVPNTSDVVIVRFGLSIAQLIDVDEKNQMMTTNVWLKQEWSDYKLRWNPADFGNITSLRVPSEMIWIPDIVLYNNADGEFAVTHMTKAHLFSTGTVHWVPPAIYKSSCSIDVTFFPFDQQNCKMKFGSWTYDKAKIDLEQMEQTVDLKDYWESGEWAIVNATGTYNSKKYDCCAEIYPDVTYAFVIRRLPLFYTINLIIPCLLISCLTVLVFYLPSDCGEKITLCISVLLSLTVFLLLITEIIPSTSLVIPLIGEYLLFTMIFVTLSIVITVFVLNVHHRSPSTHTMPHWVRGALLGCVPRWLLMNRPPPPVELCHPLRLKLSPSYHWLESNVDAEEREVVVEEEDRWACAGHVAPSVGTLCSHGHLHSGASGPKAEALLQEGELLLSPHMQKALEGVHYIADHLRSEDADSSVKEDWKYVAMVIDRIFLWLFIIVCFLGTIGLFLPPFLAGMI

SEQ ID NO: 113 - protein, 202 aa, Homo sapien [sequence omitted]

SEQ ID NO: 114 - protein, 267 aa, Homo sapien
MRLTVLCAVCLLPGSLALPLPQEAGGMSELQWEQAQDYLKRFYLYDSETKNANSLEAKLKEMQKFFGLPITGMLNSRVIEIMQKPRCGVPDVAEYSLFPNSPKWTSKVVTYRIVSYTRDLPHITVDRLVSKALNMWGKEIPLHFRKVVWGTADIMIGFARGAHGDSYPFDGPGNTLAHAFAPGTGLGGDAHFDEDERWTDGSSLGINFLYAATHELGHSLGMGHSSDPNAVMYPTYGNGDPQNFKLSQDDIKGIQKLYGKRSNSRKK

SEQ ID NO: 115 - protein, 314 aa, Homo sapien [sequence omitted]

SEQ ID NO: 116 - protein, 130 aa, Homo sapien [sequence omitted]

SEQ ID NO: 117 - protein, 799 aa, Homo sapien
MPRAPAPLYACLLGLCALLPRLAGLNICTSGSATSCEECLLIHPKCAWCSKEDFGSPRSITSRCDLRANLVKNGCGGEIESPASSFHVLRSLPLSSKGSGSAGWDVIQMTPQEIAVNLRPGDKTTFQLQVRQVEDYPVDLYYLMDLSLSMKDDLDNIRSLGTKLAEEMRKLTSNFRLGFGSFVDKDISPFSYTAPRYQTNPCIGYKLFPNCVPSFGFRHLLPLTDRVDSFNEEVRKQRVSRNRDAPEGGFDAVLQAAVCKEKIGWRKDALHLLVFTTDDVPHIALDGKLGGLVQPHDGQCHLNEANEYTASNQMDYPSLALLGEKLAENNINLIFAVTKNHYMLYKNFTALIPGTTVEILDGDSKNIIQLIINAYNSIRSKVELSVWDQPEDLNLFFTATCQDGVSYPGQRKCEGLKIGDTASFEVSLEARSCPSRHTEHVFALRPVGFRDSLEVGVTYNCTCGCSVGLEPNSARCNGSGTYVCGLCECSPGYLGTRCECQDGENQSVYQNLCREAEGKPLCSGRGDCSCNQCSCFESEFGKIYGPFCECDNFSCARNKGVLCSGHGECHCGECKCHAGYIGDNCNCSTDISTCRGRDGQICSERGHCLCGQCQCTEPGAFGEMCEKCPTCPDACSTKRDCVECLLLHSGKPDNQTCHSLCRDEVITWVDTIVKDDQEAVLCFYKTAKDCVMMFTYVELPSGKSNLTVLREPECGNTPNAMTILLAVVGSILLVGLALLAIWKLLVTIHDRREFAKFQSERSRARYEMASNPLYRKPISTHTVDFTFNKFNKSYNGTVD

SEQ ID NO: 118 - protein, 680 aa, Homo sapien
MLPQIPFLLLVSLNLVHGVFYAERYQMPTGIKGPLPNTKTQFFIPYTIKSKGIAVRGEQGTPGPPGPAGPRGHPGPSGPPGKPGYGSPGLQGEPGLPGPPGPSAVGKPGVPGLPGKPGERGPYGPKGDVGPAGLPGPRGPPGPPGIPGPAGISVPGKPGQQGPTGAPGPRGFPGEKGAPGVPGMNGQKGEMGYGAPGRPGERGLPGPQGPTGPSGPPGVGKRGENGVPGQPGIKGDRGFPGEMGPIGPPGPQGPPGERGPEGIGKPGAAGAPGQPGIPGTKGLPGAPGIAGPPGPPGFGKPGLPGLKGERGPAGLPGGPGAKGEQGPAGLPGKPGLTGPPGNMGPQGPKGIPGSHGLPGPKGETGPAGPAGYPGAKGERGSPGSDGKPGYPGKPGLDGPKGNPGLPGPKGDPGVGGPPGLPGPVGPAGAKGMPGHNGEAGPRGAPGIPGTRGPIGPPGIPGFPGSKGDPGSPGPPGPAGIATKGLNGPTGPPGPPGPRGHSGEPGLPGPPGPPGPPGQAVMPEGFIKAGQRPSLSGTPLVSANQGVTGMPVSAFTVILSKAYPAIGTPIPFDKILYNRQQHYDPRTGIFTCQIPGIYYFSYHVHVKGTHVWVGLYKNGTPVMYTYDEYTKGYLDQASGSAIIDLTENDQVWLQLPNAESNGLYSSEYVHSSFSGFLVAPM

SEQ ID NO: 119 - protein, 508 aa, Homo sapien
MLLWSLLVIFDAVTEQADSLTLVAPSSVFEGDSIVLKCQGEQNWKIQKMAYHKDNKELSVFKKFSDFLIQSAVLSDSGNYFCSTKGQLFLWDKTSNIVKIKVQELFQRPVLTASSFQPIEGGPVSLKCETRLSPQRLDVQLQFCFFRENQVLGSGWSSSPELQISAVWSEDTGSYWCKAETVTHRIRKQSLQSQIHVQRIPISNVSLEIRAPGGQVTEGQKLILLCSVAGGTGNVTFSWYREATGTSMGKKTQRSLSAELEIPAVKESDAGKYYCRADNGHVPIQSKVVNIPVRIPVSRPVLTLRSPGAQAAVGDLLELHCEALRGSPPILYQFYHEDVTLGNSSAPSGGGASFNLSLTAEHSGNYSCEANNGLGAQCSEAVPVSISGPDGYRRDLMTAGVLWGLFGVLGFTGVALLLYALFHKISGESSATNEPRGASRPNPQEFTYSSPTPDMEELQPVYVNVGSVDVDVVYSQVWSMQQPESSANIRTLLENKDSQVIYSSVKKS

SEQ ID NO: 120 - protein, 386 aa, Homo sapien
LRQGLSGGGGSLASGGPGPGHASLSQRLRLYLADSWNQCDLVALTCFLLGVGCRLTPGLYHLGRTVLCIDFMVFTVRLLHIFTVNKQLGPKIVIVSKMMKDVFFFLFFLGVWLVAYGVATEGLLRPRDSDFPSILRRVFYRPYLQIFGQIPQEDMDVALMEHSNCSSEPGFWAHPPGAQAGTCVSQYANWLVVLLLVIFLLVANILLVNLLIAMFSYTFGKVQGNSDLYWKAQRYRLIREFHSRPALAPPFIVISHLRLLLRQLCRRPRSPQPSSPALEHFRVYLSKEAERKLLTWESVHKENFLLARARDKRESDSERLKRTSQKVDLALKQLGHIREYEQRLKVLEREVQQCSRVLGWVAEALSRSALLPPGGPPPPDLPGSKD

SEQ ID NO: 121 - protein, 529 aa, Homo sapien; identical to SEQ ID NO: 112

SEQ ID NO: 122 - protein, 339 aa, Homo sapien; identical to SEQ ID NO: 96

SEQ ID NO: 123 - protein, 1127 aa, Homo sapien
MHNTTEKPTDAYGELDFTGAGRKHSNFLRLSDRTDPAAVYSLVTRTWGFRAPNLVVSVLGGSGGPVLQTWLQDLLRRGLVRAAQSTGAWIVTGGLHTGIGRHVGVAVRDHQMASTGGTKVVAMGVAPWGVVRNRDTLINPKGSFPARYRWRGDPEDGVQFPLDYNYSAFFLVDDGTHGCLGGENRFRLRLESYISQQKTGVGGTGIDIPVLLLLIDGDEKMLTRIENATQAQLPCLLVAGSGGAADCLAETLEDTLAPGSGGARQGEARDRIRRFFPKGDLEVLQAQVERIMTRKELLTVYSSEDGSEEFETIVLKALVKACGSSEASAYLDELRLAVAWNRVDIAQSELFRGDIQWRSFHLEASLMDALLNDRPEFVRLLISHGLSLGHFLTPMRLAQLYSAAPSNSLIRNLLDQASHSAGTKAPALKGGAAELRPPDVGHVLRMLLGKMCAPRYPSGGAWDPHPGQGFGESMYLLSDKATSPLSLDAGLGQAPWSDLLLWALLLNRAQMAMYFWEMGSNAVSSALGACLLLRVMARLEPDAEEAARRKDLAFKFEGMGVDLFGECYRSSEVRAARLLLRRCPLWGDATCLQLAMQADARAFFAQDGVQSLLTQKWWGDMASTTPIWALVLAFFCPPLIYTRLITFRKSEEEPTREELEFDMDSVINGEGPVGTADPAEKTPLGVPRQSGRPGCCGGRCGGRRCLRRWFHFWGAPVTIFMGNVVSYLLFLLLFSRVLLVDFQPAPPGSLELLLYFWAFTLLCEELRQGLSGGGGSLASGGPGPGHASLSQRLRLYLADSWNQCDLVALTCFLLGVGCRLTPGLYHLGRTVLCIDFMVFTVRLLHIFTVNKQLGPKIVIVSKMMKDVFFFLFFLGVWLVAYGVATEGLLRPRDSDFPSILRRVFYRPYLQIFGQIPQEDMDVALMEHSNCSSEPGFWAHPPGAQAGTCVSQYANWLVVLLLVIFLLVANILLVNLLIAMFSYTFGKVQGNSDLYWKAQRYRLIREFHSRPALAPPFIVISHLRLLLRQLCRRPRSPQPSSPALEHFRVYLSKEAERKLLTWESVHKENFLLARARDKRESDSERLERTSQKVDLALKQLGHIREYEQRLKVLEREVQQCSRVLGWVT

SEQ ID NO: 124 - protein, 1932 aa, Homo sapien
MHLHRRFTDLIWKNLCPALIVILGNPIHDKTITSAHTSSTSTSLESDSASPGVSDHGRGSGCSCTAPALSGPVARTIYYIAAELVRLVGSVDSMKPVLQSLYHRVLLYPPPQHRVEAIKIMKEILGSPQRLCDLAGPSSTESESRKRSISKRKSHLDLLKLIMDGMTEACIKGGIEACYAAVSCVCTLLGALDELSQGKGLSEGQVQLLLLRLEELKDGAEWSRDSMEINEADFRWQRRVLSSEHTPWESGNERSLDISISVTTDTGQTTLEGELGQTTPEDHSGNHKNSLKSPAIPEGKETLSKVLETEAVDQPDVVQRSHTVPYPDITNFLSVDCRTRSYGSRYSESNFSVDDQDLSRTEFDSCDQYSMAAEKDSGRSDVSDIGSDNCSLADEEQTPRDCLGHRSLRTAALSLKLLKNQEADQHSARLFIQSLEGLLPRLLSLSNVEEVDTALQNFASTFCSGMMHSPGFDGNSSLSFQMLMNADSLYTAAHCALLLNLKLSHGDYYRKRPTLAPGVMKDFMKQVQTSGVLMVFSQAWIEELYHQVLDRNMLGEAGYWGSPEDNSLPLITMLTDIDGLESSAIGGQLMASAATESPFAQSRRIDDSTVAGVAFARYILVGCWKNLIDTLSTPLTGRMAGSSKGLAFILGAEGIKEQNQKERDAICMSLDGLRKAARLSCALGVAANCASALAQMAAASCVQEEKEEREAQEPSDAITQVKLKVEQKLEQIGKVQGVWLHTAHVLCMEAILSVGLEMGSHNPDCWPHVFRVCEYVGTLEHNHFSDGASQPPLTISQPQKATGSAGLLGDPECEGSPPEHSPEQGRSLSTAPVVQPLSIQDLVREGSRGRASDFRGGSLMSGSSAAKVVLTLSTQADRLFEDATDKLNLMALGGFLYQLKKASQSQLFHSVTDTVDYSLAMPGEVKSTQDRKSALHLFRLGNAMLRIVRSKARPLLHVMRCWSLVAPHLVEAACHKERHVSQKAVSFIHDILTEVLTDWNEPPHFHFNEALFRPFERIMQLELCDEDVQDQVVTSIGELVEVCSTQIQSGWRPLFSALETVHGGNKSEMKEYLVGDYSMGKGQAPVFDVFEAFLNTDNIQVFANAATSYIMCLMKFVKGLGEVDCKEIGDCAPAPGAPSTDLCLPALDYLRRCSQLLAKIYKMPLKPIFLSGRLAGLPRRLQEQSASSEDGIESVLSDFDDDTGLIEVWIILLEQLTAAVSNCPRQHQPPTLDLLFELLRDVTKTPGPGFGIYAVVHLLLPVMSVWLRRSHKDHSYWDMASANFKHAIGLSCELVVEHIQSFLHSDIRYESMINTMLKDLFELLVACVAKPTETISRVGCSCIRYVLVTAGPVFTEEMWRLACCALQDAFSATLKPVKDLLGCFHSGTESFSGEGCQVRVAAPSSSPSAEAEYWRIRAMAQQVFMLDTQCSPKTPNNFDHAQSCQLIIELPPDEKPNGHTKKSVSFREIVVSLLSHQVLLQNLYDILLEEFVKGPSPGEEKTIQVPEAKLAGFLRYISMQNLAVIFDLLLDSYRTAREFDTSPGLKCLLKKVSGIGGAANLYRQSAMSFNIYFHALVCAVLTNQETITAEQVKKVLFEDDERSTDSSQQCSSEDEDIFEETAQVSPPRGKEKRQWRARMPLLSVQPVSNADWVWLVKRLHKLCMELCNNYIQMHLDLENCMEEPPIFKGDPFFILPSFQSESSTPSTGGFSGKETPSEDDRSQSREHMGESLSLKAGGGDLLLPPSPKVEKKDPSRKKEWWENAGNKIYTMAADKTISKLMTEYKKRKQQHNLSAFPKEVKVEKKGEPLGPRGQDSPLLQRPQHLMDQGQMRHSFSAGPELLRQDKRPRSGSTGSSLSVSVRDAEAQIQAWTNMVLTVLNQIQILPDQTFTALQPAVFPCISQLTCHVTDIRVRQAVREWLGRVGRVYDIIV

SEQ ID NO: 125 - protein, 317 aa, Homo sapien
MVDPNGNESSATYFILIGLPGLEEAQFWLAFPLCSLYLIAVLGNLTIIYIVRTEHSLHEPMYIFLCMLSGIDILISTSSMPKMLAIFWFNSTTIQFDACLLQIFAIHSLSGMESTVLLAMAFDRYVAICHPLRHATVLTLPRVTKIGVAAVVRGAALMAPLPVFIKQLPFCRSNILSHSYCLHQDVMKLACDDIRVNVVYGLIVIISAIGLDSLLISFSYLLILKTVLGLTREAQAKAFGTCVSHVCAVFIFYVPFIGLSMVHRFSKRRDSPLPVILANIYLLVPPVLNPIVYGVKTKEIRQRILRLFHVATHASEP

SEQ ID NO: 126 - protein, 530 aa, Homo sapien
MGSNSGQAGRHIYKSLADDGPFDSVEPPKRPTSRLIMHSMAMFGREFCYAVEAAYVTPVLLSVGLPSSLYSIVWFLSPILGFLLQPVVGSASDHCRSRWGRRRPYILTLGVMMLVGMALYLNGATVVAALIANPRRKLVWAISVTMIGVVLFDFAADFIDGPIKAYLFDVCSHQDKEKGLHYHALFTGFGGALGYLLGAIDWAHLELGRLLGTEFQVMFFFSALVLTLCFTVHLCSISEAPLTEVAKGIPPQQTPQDPPLSSDGMYEYGSIEKVKNGYVNPELAMQGAKNKNHAEQTRRAMTLKSLLRALVNMPPHYRYLCISHLIGWTAFLSNMLFFTDFMGQIVYRGDPYSAHNSTEFLIYERGVEVGCWGFCINSVFSSLYSYFQKVLVSYIGLKGLYFTGYLLFGLGTGFIGLFPNVYSTLVLCSLFGVMSSTLYTVPFNLITEYHREEEKERQQAPGGDPDNSVRGKGMDCATLTCMVQLAQILVGGGLGFLVNTAGTVVVVVITASAVALIGCCFVALFVRYVD

SEQ ID NO: 127 - protein, 811 aa, Homo sapien
MRLIRNIYIFCSIVMTAEGDAPELPEERELMTNCSNMSLRKVPADLTPATTTLDLSYNLLFQLQSSDFHSVSKLRVLILCHNRIQQLDLKTFEFNKELRYLDLSNNRLKSVTWYLLAGLRYLDLSFNDFDTMPICEEAGNMSHLEILGLSGAKIQKSDFQKIAHLHLNTVFLGFRTLPHYEEGSLPILNTTKLHIVLPMDTNFWVLLRDGIKTSKILEMTNIDGKSQFVSYEMQRNLSLENAKTSVLLLNKVDLLWDDLFLILQFVWHTSVEHFQIRNVTFGGKAYLDHNSFDYSNTVMRTIKLEHVHFRVFYIQQDKIYLLLTKMDIENLTISNAQMPHMLFPNYPTKFQYLNFANNILTDELFKRTIQLPHLKTLILNGNKLETLSLVSCFANNTPLEHLDLSQNLLQHKNDENCSWPETVVNMNLSYNKLSDSVFRCLPKSIQILDLNNNQIQTVPKETIHLMALRELNIAFNFLTDLPGCSHFSRLSVLNIEMNFILSPSLDFVQSCQEVKTLNAGRNPFRCTCELKNFIQLETYSEVMMVGWSDSYTCEYPLNLRGTRLKDVHLHELSCNTALLIVTIVVIMLVLGLAVAFCCLHFDLPWYLRMLGQCTQTWHRVRKTTQEQLKRNVRFHAFISYSEHDSLWVKNELIPNLEKEDGSILICLYESYFDPGKSISENIVSFIEKSYKSIFVLSPNFVQNEWCHYEFYFAHHNLFHENSDHIILILLEPIPFYCIPTRYHKLKALLEKKAYLEWPKDRRKCGLFWANLRAAINVNVLATREMYELQTFTELNEESRGSTISLMRTDCL

SEQ ID NO: 128 - protein, 1382 aa, Homo sapien
MTRKRTYWVPNSSGGLVNRGIDIGDDMVSGLIYKTYTLQDGPWSQQERNPEAPGRAAVPPWGKYDAALRTMIPFRPKPRFPAPQPLDNAGLFSYLTVSWLTPLMIQSLRSRLDENTIPPLSVHDASDKNVQRLHRLWEEEVSRRGIEKASVLLVMLRFQRTRLIFDALLGICFCIASVLGPILIIPKILEYSEEQLGNVVHGVGLCFALFLSECVKSLSFSSSWIINQRTAIRFRAAVSSFAFEKLIQFKSVIHITSGEAISFFTGDVNYLFEGVCYGPLVLITCASLVICSISSYFIIGYTAFIAILCYPLVFPLEVFMTRMAVKAQHHTSEVSDQRIRVTSEVLTCIKLIKMYTWEKPFAKIIEDLRRKERKLLEKCGLVQSLTSITLFIIPAVATAVWVLIHTSLKLKLTASMAFSMLASLNLLRLSVFFVPIAVKGLTNSKSAVMRFKKFFLQESPVFYVQTLQDPSKALVFEEATLSWQQTCPGIVNGALELERNGHASEGMTRPRDALGPEEEGNSLGPELHKINLVVSKGMMLGVCGNTGSGKSSLLSAILEEMHLLEGSVGVQGSLAYVPQQAWIVSGNIRENILMGGAYDKARYLQVLHCCSLNRDLELLPFGDMTEIGERGPNLSGGQKQRISLARAVYSDRQIYLLDDPLSAVDAHVGKHIFEECIKKTLRGKTVVQVTHQLQYLEFCGQVILLENGKICENGTHSELMQKKGKYAQLIQKMHKEATSDMLQDTAKIAEKPKVESQALATSLEESLNGNAVPEHQLTQEEEMEEGSLSWRVYHHYIQAAGGYMVSCIIFFFVVLIVFLTIFSFWWLSYWLEQGSGTNSSRESNGTMADLGNIADNPQLSFYQLVYGLNALLLICVGVCSSGIFTKVTRKASTALHNKLFNKVFRCPMSFFDTIPIGRLLNCFAGDLEQLDQLLPIFSEQFLVLSLMVIAVLLIVSVLSPYILLMGAIIMVICFIYYMMFKEAIGVFKRLENYSRSPLFSHILNSLQGLSSIHVYGKTEDFISQFKRLTDAQNNYLLLFLSSTRWMALRLEIMTNLVTLAVALFVAFGISSTPYSFKVMAVNIVLQLASSFQATARIGLETEAQFTAVERILQYMKMCVSEAPLHMEGTSCPQGWPQHGEIIFQDYHMKYRDNTPTVLHGINLTIRGHEVVGIVGRTGSGKSSLGMALFRLVEPMAGRILIDGVDICSIGLEDLRSKLSVIPQDPVLLSGTIRFNLDPFDRHTDQQIWDALERTFLTKAISKFPKKLHTDVVENGGNFSVGERQLLCIARAVLRNSKIILIDEATASIDMETDTLIQRTIREAFQGCTVLVIAHRVTTVLNCDRILVMGNGKVVEFDRPEVLRKKPGSLFAALMATATSSLR

SEQ ID NO: 129 - protein, 364 aa, Homo sapien
MSVMVVRKKVTRKWEKLPGRNTFCCDGRVMMARQKGIFYLTLFLILGTCTLFFAFECRYLAVQLSPAIPVFAAMLFLFSMATLLRTSFSDPGVIPRALPDEAAFIEMEIEATNGAVPQGQRPPPRIKNFQINNQIVKLKYCYTCKIFRPPRASHCSICDNCVERFDHHCPWVGNCVGKRNYRYFYLFILSLSLLTIYVFAFNIVYVALKSLKIGFLETLKETPGTVLEVLICFFTLWSVVGLTGFHTFLVALNQTTNEDIKGSWTGKNRVQNPYSHGNIVKNCCEVLCGPLPPSVLDRRGILPLEESGSRPPSTQETSSSLLPQSPAPTEHLNSNEMPEDSSTPEEMPPPEPPEPPQEAAEAEK

SEQ ID NO: 130 - protein, 204 aa, Homo sapien
MVCGGFACSKNCLCALNLLYTLVSLLLIGIAAWGIGFGLISSLRVVGVVIAVGIFLFLIALVGLIGAVKHHQVLLFFYMIILLLVFIVQFSVSCACLALNQEQQGQLLEVGWNNTASARNDIQRNLNCCGFRSVNPNDTCLASCVKSDHSCSPCAPIIGEYAGEVLRFVGGIGLFFSFTEILGVWLTYRYRNQKDPRANPSAFL

SEQ ID NO: 131 - protein, 359 aa, Homo sapien
MKLGCVLMAWALYLSLGVLWVAQMLLAASFETLQCEGPVCTEESSCHTEDDLTDAREAGFQVKAYTFSEPFHLIVSYDWLILQGPAKPVFEGDLLVLRCQAWQDWPLTQVTFYRDGSALGPPGPNREFSITVVQKADSGHYHCSGIFQSPGPGIPETASVVAITVQELFPAPILRAVPSAEPQAGSPMTLSCQTKLPLQRSAARLLFSFYKDGRIVQSRGLSSEFQIPTASEDHSGSYWCEAATEDNQVWKQSPQLEIRVQGASSSAAPPTLNPAPQKSAAPGTAPEEAPGPLPPPPTPSSEDPGFSSPLGMPDPHLYHQMGLLLKHMQDVRVLLGHLLMELRELSGHQKPGTTKATAE

SEQ ID NO: 132 - protein, 420 aa, Homo sapien
MPGGCSRGPAAGDGRLRLARLALVLLGWVSSSSPTSSASSFSSSAPFLASAVSAQPPLPDQCPALCECSEAARTVKCVNRNLTEVPTDLPAYVRNLFLTGNQLAVLPAGAFARRPPLAELAALNLSGSRLDEVRAGAFEHLPSLRQLDLSHNPLADLSPFAFSGSNASVSAPSPLVELILNHIVPPEDERQNRSFEGMVVAALLAGRALQGLRRLELASNHFLYLPRDVLAQLPSLRHLDLSNNSLVSLTYVSFRNLTHLESLHLEDNALKVLHNGTLAELQGLPHIRVFLDNNPWVCDCHMADMVTWLKETEVVQGKDRLTCAYPEKMRNRVLLELNSADLDCDPILPPSLQTSYVFLGIVLALIGAIFLLVLYLNRKGIKKWMHNIRDACRDHMEGYHYRYEINADPRLTNLSSNSDV

SEQ ID NO: 133 - protein, 314 aa, Homo sapien
MAPPQVLAFGLLLAAATATFAAAQEECVCENYKLAVNCFVNNNRQCQCTSVGAQNTVICSKLAAKCLVMKAEMNGSKLGRRAKPEGALQNNDGLYDPDCDESGLFKAKQCNGTSTCWCVNTAGVRRTDKDTEITCSERVRTYWIIIELKHKAREKPYDSKSLRTALQKEITTRYQLDPKFITSILYENNVITIDLVQNSSQKTQNDVDIADVAYYFEKDVKGESLFHSKKMDLTVNGEQLDLDPGQTLIYYVDEKAPEFSMQGLKAGVIAVIVVVVIAVVAGIVVLVISRKKRMAKYEKAEIKEMGEMHRELNA

SEQ ID NO: 134 - protein, 1092 aa, Homo sapien
MPCGFSPSPVAHHLVPGPPDTPAQQLRCGWTVGGWLLSLVRGLLPCLPPGARTAEGPIMVLAGPLAVSLLLPSLTLLVSHLSSSQDVSSEPSSEQQLCALSKHPTVAFEDLQPWVSNFTYPGARDFSQLALDPSGNQLIVGARNYLFRLSLANVSLLQATEWASSEDTRRSCQSKGKTEEECQNYVRVLIVAGRKVFMCGTNAFSPMCTSRQVGNLSRTIEKINGVARCPYDPRHNSTAVISSQGELYAATVIDFSGRDPAIYRSLGSGPPLRTAQYNSKWLNEPNFVAAYDIGLFAYFFLRENAVEHDCGRTVYSRVARVCKNDVGGRFLLEDTWTTFMKARLNCSRPGEVPFYYNELQSAFHLPEQDLIYGVFTTNVNSIAASAVCAFNLSAISQAFNGPFRYQENPRAAWLPIANPIPNFQCGTLPETGPNENLTERSLQDAQRLFLMSEAVQPVTPEPCVTQDSVRFSHLVVDLVQAKDTLYHVLYIGTESGTILKALSTASRSLHGCYLEELHVLPPGRREPLRSLRILHSARALFVGLRDGVLRVPLERCAAYRSQGACLGARDPYCGWDGKQQRCSTLEDSSNMSLWTQNITACPVRNVTRDGGFGPWSPWQPCEHLDGDNSGSCLCRARSCDSPRPRCGGLDCLGPAIHIANCSRNGAWTPWSSWALCSTSCGIGFQVRQRSCSNPAPRHGGRIFVGKSREERFCNENTPCPVPIFWASWGSWSKCSSNCGGGMQSRRRACENGNSCLGCGEFKTCNPEGCPEVRRNTPWTPWLPVNVTQGGARQEQRFRFTCRAPLADPHGLQFGRRRTETRTCPADGSGSCDTDALVEVLLRSGSTSPHTVSGGWAAWGPWSSCSRDCELGFRVRKRTCTNPEPRNGGLPCVGDAAEYQDCNPQACPVRGAWSCWTSWSPCSASCGGGHYQRTRSCTSPAPSPGEDICLGLHTEEALCATQACPGWSPWSEWSKCTDDGAQSRSRHCEELLPGSSACAGNSSQSRPCPYSEIPVILPASSMEEATDCAGKRNRTYLMLRSSQPSSTPLQSLDSFHILLQTAKLCWGPHCFEMGSISSTWWPRASPASWALGS

SEQ ID NO: 135 - protein, 260 aa, Homo sapien
MAKDNSTVRCFQGLLIFGNVIIGCCGIALTAECIFFVSDQHSLYPLLEATDNDDIYGAAWIGIFVGICLFCLSVLGIVGIMKSSRKILLAYFILMFIVYAFEVASCITAATQQDFFTPNLFLKQMLERYQNNSPPNNDDQWKNNGVTKTWDRLMLQDNCCGVNGPSDWQKYTSAFRTENNDADYPWPRQCCVMNNLKEPLNLEACKLGVPGFYHNQGCYELISGPMNRHAWGVAWFGFAILCWTFWVLLGTMFYWSRIEY

SEQ ID NO: 136 - protein, 289 aa, Homo sapien
MFDKTRLPYVALDVLCVLLAGLPFAIFTSRHITSRHTPFQRGVFCNDESIKYPYKEDTIPYALLGGIIIPFSIIVIILGETLSVYCNLLHSNSFIRNNYIATIYKAIGTFLFGAAASQSLTDIAKYSIGRLRPHFLDVCDPDWSKINCSDGYIEYYICRGNAERVKEGRLSFYSGHSSFSMYCMLFVALYLQARMKGDWARLLRPTLQFGLVAVSIYVGLSRVSDYKHHWSDVLTGLIQGALVAILVAVYVSDFFKERTSFKERKEEDSHTTLHETPTTGNHYPSNHQP

SEQ ID NO: 137 - protein, 734 aa, Homo sapien
MLLWLLLLILTPGREQSGVAPKAVLLLNPPWSTAFKGEKVALICSSISHSLAQGDTYWYHDEKLLKIKHDKIQITEPGNYQCKTRGSSLSDAVHVEFSPDWLILQALHPVFEGDNVILRCQGKDNKNTHQKVYYKDGKQLPNSYNLEKITVNSVSRDNSKYHCTAYRKFYILDIEVTSKPLNIQVQELFLHPVLRASSSTPIEGSPMTLTCETQLSPQRPDVQLQFSLFRDSQTLGLGWSRSPRLQIPAMWTEDSGSYWCEVETVTHSIKKRSLRSQIRVQRVPVSNVNLEIRPTGGQLIEGENMVLICSVAQGSGTVTFSWHKEGRVRSLGRKTQRSLLAELHVLTVKESDAGRYYCAADNVHSPILSTWIRVTVRIPVSHPVLTFRAPRAHTVVGDLLELHCESLRGSPPILYRFYHEDVTLGNSSAPSGGGASFNLSLTAEHSGNYSCDADNGLGAQHSHGVSLRVTVPVSRPVLTLRAPGAQAVVGDLLELHCESLRGSFPILYWFYHEDDTLGNISAHSGGGASFNLSLTTEHSGNYSCEADNGLGAQHSKVVTLNVTGTSRNRTGLTAAGITGLVLSILVLAAAAALLHYARARRKPGGLSATGTSSHSPSECQEPSSSRPSRIDPQEPTHSKPLAPMELEPMYSNVNPGDSNPIYSQIWSIQHTKENSANCPMMHQEHEELTVLYSELKKTHPDDSAGEASSRGRAHEEDDEENYENVPRVLLASDH

SEQ ID NO: 138 - protein, 251 aa, Homo sapien
MEGGAAAATPTALPYYVAFSQLLGLTLVAMTGAWLGLYRGGIAWESDLQFNAHPLCMVIGLIFLQGNALLVYRVFRNEAKRTTKVLHGLLHIFALVIALVGLVAVFDYHRKKGYADLYSLHSWCGILVFVLYFVQWLVGFSFFLFPGASFSLRSRYRPQHIFFGATIFLLPVGTALLGLKEALLFNLGGKYSAFEPEGVLANVLGLLLACFGGAVLYILTRADWKRPSQAEEQALSMDFKTLRQGDSPGSQ

SEQ ID NO: 139 - protein, 391 aa, Homo sapien
MRQLCRGRVLGISVAIAHGVFSGSLNILLKFLISRYQFSFLTLVQCLTSSTAALSLELLRRLGLIAVPPFGLSLARSFAGVAVLSTLQSSLTLWSLRGLSLPMYVVFKRCLPLVTMLIGVLVLKNGAPSPGVLAAVLITTCGAALAGAGDLTGDPIGYVTGVLAVLVHAAYLVLIQKASADTEHGPLTAQYVIAVSATPLLVICSFASTDSIHAWTFPGWKDPAMVCIFVACILIGCAMNFTTLHCTYINSAVTTSLFIAGVVVNTLGSIIYCVAKFMETRKQSNYEDLEAQPRGEEAQLSGDQLPFVMEELPGEGGNGRSEGGEAAGGPAQESRQEVRGSPRGVPLVAGSSEEGSRRSLKDAYLEVWRLVRGTRYMKKDYLIENEELPSP

SEQ ID NO: 140 - protein, 229 aa, Homo sapien
MARLALSPVPSHWMVALLLLLSAEPVPAARSEDRYRNPKGSACSRIWQSPRFIARKRGFTVKMHCYMNSASGNVSWLWKQEMDENPQQLKLEKGRMEESQNESLATLTIQGIRFEDNGIYFCQQKCNNTSEVYQGCGTELRVMGFSTLAQLKQRNTLKDGIIMIQTLLIILFIIVPIFLLLDKDDSKAGMEEDHTYEGLDIDQTATYEDIVTLRTGEVKWSVGEHPGQE

SEQ ID NO: 141 - protein, 699 aa, Homo sapien [sequence omitted]

SEQ ID NO: 142 - protein, 287 aa, Homo sapien
MPPLWALLALGCLRFGSAVNLQPQLASVTFATNNPTLTTVALEKPLCMFDSKEALTGTHEVYLYVLVDSAISRNASVQDSTNTPLGSTFLQTEGGRTGPYKAVAFDLIPCSDLPSLDAIGDVSKASQILNAYLVRVGANGTCLWDPNFQGLCNAPLSAATEYRFKYVLVNMSTGLVEDQTLWSDPIRTNQLTPYSTIDTWPGRRSGGMIVITSILGSLPFFLLVGFAGAIALSLVDMGSSDGETTHDSQITQEAVPKSLGASESSYTSVNRGPPLDRAEVYSSKLQD

SEQ ID NO: 143 - protein, 196 aa, Homo sapien
MRKLIAGLIFLKFWTYTVRASTDLPQTENCFQYIHQVTEISSTLPVALLRDEVPGWFLKVPEPQLISKELIMLTEVMEVWHGLVIAVVSLFLQACFLTAINYLLSRHMAHKSEQILKAASLQVPRPSPGHHHPPAVKEMKETQTERDIPMSDSLYRHDSDTPSDSLDSSCSSPPACQATEDVDYTQVVFSDPGELK

SEQ ID NO: 144 - protein, 580 aa, Homo sapien
MAGTVRTACLVVAMLLSLDFPGQAQPPPPPPDATCHQVRSFFQRLQPGLKWVPETPVPGSDLQVCLPKGPTCCSRKMEEKYQLTARLNMEQLLQSASMELKFLIIQNAAVFQEAFEIVVRHAKNYTNAMFKNNYPSLTPQAFEFVGEFFTDVSLYILGSDINVDDMVNELFDSLFPVIYTQLMNPGLPDSALDINECLRGARRDLKVFGNFPKLIMTQVSKSLQVTRIFLQALNLGIEVINTTDHLKFSKDCGRMLTRMWYCSYCQGLMMVKPCGGYCNVVMQGCMAGVVEIDKYWREYILSLEELVNGMYRIYDMENVLLGLFSTIHDSIQYVQKNAGKLTTTIGKLCAHSQQRQYRSAYYPEDLFIDKKVLKVAHVEHEETLSSRRRELIQKLKSFISFYSALPGYICSHSPVAENDTLCWNGQELMERYSQKAARNGMKNQFNLHELKMKGPEPVVSQIIDKLKHINQLLRTMSMPKGRVLDKNLDEEGFESGDCGDDEDECIGGSGDGMIKVKNQLRFLAELAYDLDVDDAPGNSQQATPKDNEISTFHNLGNVHSPLKLLTSMAISVVCFFFLVH

SEQ ID NO: 145 - protein, 829 aa, Homo sapien [sequence omitted]

SEQ ID NO: 146 - protein, 462 aa, Homo sapien
GDCGDRGTARGTRREGTGIRSSGRAMDGNDNVTLLFAPLLRDNYTLAPNASSLGPGTDLALAPASSAGPGPGLSLGPGPSFGFSPGPTPTPEPTTSGLAGGAASHGPSPFPRPWAPHALPFWDTPLNHGLNVFVGAALCITMLGLGCTVDVNHFGAHVRRPVGALLAALCQFGLLPLLAFLLALAFKLDEVAAVAVLLCGCCPGGNLSNLMSLLVDGDMNLSIIMTISSTLLALVLMPLCLWIYSWAWINTPIVQLLPLGTVTLTLCSTLIPIGLGVFIRYKYSRVADYIVKVSLWSLLVTLVVLFIMTGTMLGPELLASIPAAVYVIAIFMPLAGYASGYGLATLFHLPPNCKRTVCLETGSQNVQLCTAILKLAFPPQFIGSMYMFPLLYALFQSAEAGIFVLIYKMYGSEMLHKRDPLDEDEDTDISYKKLKEEEMADTSYGTVKAENIIMMETAQTSL

SEQ ID NO: 147 - protein, 335 aa, Homo sapien
MVRRDRLRRMREWWVQVGLLAVPLLAAYLHIPPPQLSPALHSWKSSGKFFTYKGLRIFYQDSVGVVGSPEIVVLLHGFPTSSYDWYKIWKGLTLRFHRVIALDFLGFGFSDKPRPHHYSIFEQASIVEALLRHLGLQNRRINLLSHDYGDIVAQELLYRYKQNRSGRHTIKSLCLSNGGIFPETHRPLLLQKLLKDGGVLSPILTRLMNFFVFSRGLTPVFGPYTRPSESELWDMWAGIRNNDGNLVIDSLLQYINQRKKFRRRWVGALASVTIPIHFIYGPLDPVNPYPEFLELYRKTLPRSTVSILDDHISHYPQLEDPMGFLNAYMGFINSF

SEQ ID NO: 148 - protein, 1537 aa, Homo sapien
GWTSHLSNCGESNRPPKERSCFRVCDWHSDLFQWEVSDWHHCVLVPYARGEVKPRTAECVTAQHGLQHRMVRCIQKLNRTVVANEICEHFALQPPTEQACLIPCPRDCVVSEFLPWSNCSKGCGKKLQHRTRAVIAPPLFGGLQCPNLTESRACDAPISCPLGEEEYTFSLKVGPWSKCRLPHLKEINPSGRTVLDFNSDSNERVTFKHQSYKAHHHSKSWAIEIGYQTRQVSCTRSDGQNAMLSLCLQDSFPLTVQSCIMPKDCETSQWSSWSPCSKTCRSGSLLPGFRSRSRNVKHMAIGGGKECPELLEKEACIVEGELLQQCPRYSWRTSEWKECQVSLLLEQQDPHWHVTGPVCGGGIQTREVYCAQSVPAAAALRAKEVSRPVEKALCVGPAPLPSQLCNIPCSTDCIVSSWSAWGLCIHENCHEPQGKKGFRTRQRHVLMESTGPAGHCPHLVESVPCEDPMCYRWLASEGICFPDHGKCGLGHRILKAVCQNDRGEDVSGSLCPVPPPPERKSCEIPCRMDCVLSEWTEWSSCSQSCSNKNSDGKQTRSRTILALAGEGGKPCPPSQALQEHRLCNDHSCMQLHWETSPWGPCSEDTLVTALNATIGWNGEATCGVGIQTRRVFCVKSHVGQVMTKRCPDSTRPETVRPCFLPCKKDCIVTAFSEWTPCPRMCQAGNATVKQSRYRIIIQEAANGGQECPDTLYEERECEDVSLCPVYRWKPQKWSPCILVPESVWQGITGSSEACGKGLQTRAVSCISDDNRSAEMMECLKQTNGMPLLVQECTVPCREDCTFTAWSKFTPCSTNCEATKSRRRQLTGKSRKKEKCQDSDLYPLVETELCPCDEFISQPYGNWSDCILPEGRREPHRGLRVQADSKECGEGLRFRAVACSDKNGRPVDPSFCSSSGYIQEKCVIPCPFDCKLSDWSSWGSCSSSCGIGVRIRSKWLKEKPYNGGRPCPKLDLKNQAQVHEAVPCYSECNQYSWVVEHWSSCKINNELRSLRCGGGTQSRKIRCVNTADGEGGAVDSNLCNQDEIPPETQSCSLMCPNECVMSEWGLWSKCPQSCDPHTMQRRTRHLLRPSLNSRTCAEDSQVQPCLLNENCFQFQYNLTEWSTCQLSENAPCGQGVRTRLLSCVCSDGKPVSMDQCEQHNLEKPQRMSIPCLVECVVNCQLSGWTAWTECSQTCGHGGRMSRTRFIIMPTQGEGRPCPTELTQEKTCPVTPCYSWVLGNWSACKLEGGDCGEGVQIRSLSCMVHSGSISHAAGRVEDALCGEMPFQDSILKQLCSVPCPGDCHLTEWSEWSTCELTCIDGRSFETVGRQSRSRTFIIQSFENQDSCPQQVLETRPCTGGKCYHYTWKASLWNNNERTVWCQRSDGVNVTGGCSPQARPAAIRQCIPACRKPFSYCTQGGVCGCEKGYTEIMRSNGFLDYCMKVPGSEDKKADVKNLSGKNRPVNSKIHDIFKGWSLQPLDPDGRVKIWVYGVSGGAFLIMIFLIFTSYLVCKKPKPHQSTPPQQKPLTLAYDGDLDMN

SEQ ID NO: 149 - protein, 453 aa, Homo sapien
EKPVRKQTPPTTQIHCGPPKPVLSPSFKTPATPLGLSTSTGHMLMPLCGLLWWWWCCCSGWYCYGLCAPAPQMLRHQGLLKCRCRMLFNDLKVFLLRRPPQAPLPMHGDPQPPGLAANNTLPALGAGGWAGWRGPREVVGREPPPVPPPPPLPPSSVEDDWGGPATEPPASLLSSASSDDFCKEKTEDRYSLGSSLDSGMRTPLCRICFQGPEQGELLSPCRCDGSVKCTHQPCLIKWISERGCWSCELCYYKYHVIAISTKNPLQWQAISLTVIEKVQVAAAILGSLFLIASISWLIWSTFSPSARWQRQDLLFQICYGMYGFMDVVCIGLIIHEGPSVYRIFKRWQAVNQQWKVLNYDKTKDLEDQKAGGRTNPRTSSSTQANIPSSEEETAGTPAPEQGPAQAAGHPSGPLSHHHCAYTILHILSHLRPHEQRSPPGSSRELVMRVTTVN

SEQ ID NO: 150 - protein, 981 aa, Homo sapien
QEQGDKMMEEYSLEKNERACIDFAISAKPLTRHMPQNKQSFQYRMWQFVVSPPFEYTIMAMIALNTIVLMMKFYGASVAYENALRVFNIVFTSLFSLECVLKVMAFGILNYFRDAWNIFDFVTVLGSITDILVTEFGNNFINLSFLRLFRAARLIKLLRQGYTIRILLWTFVQSFKALPYVCLLIAMLFFIYAIIGMQVFGNIGIDVEDEDSDEDEFQITEHNNFRTFFQALMLLFRSATGEAWHNIMLSCLSGKPCDKNSGILTRECGNEFAYFYFVSFIFLCSFLMLNLFVAVIMDNFEYLTRDSSILGPHHLDEYVRVWAEYDPAACGRIHYKDMYSLLRVISPPLGLGKKCPHRVACKRLLRMDLPVADDNTVHFNSTLMALIRTALDIKIAKGGADKQQMDAELRKEMMAIWPNLSQKTLDLLVTPHKSTDLTVGKIYAAMMIMEYYRQSKAKKLQAMREEQDRTPLMFQRMEPPSPTQEGGPGQNALPSTQLDPGGALMAHESGLKESPSWVTQRAQEMFQKTGTWSPEQGPPTDMPNSQPNSQSVEMREMGRDGYSDSEHYLPMEGQGRAASMPRLPAENQTISDTSPMKRSASVLGPKARRLDDYSLERVPPEENQRHHQRRRDRSHRASERSLGRYTDVDTGLGTDLSMTTQSGDLPSKERDQERGRPKDRKHRQHHHHHHHHHHPPPPDKDRYAQERPDHGRARARDQRWSRSPSEGREHMAHRQGSSSVSGSPAPSTSGTSTPRRGRRQLPQTPSTPRPHVSYSPVIRKAGGSGPPQQQQQQQQQQQQAVARPGRAATSGPRRYPGPTAEPLAGDRPPTGGHSSGRSPRMERRVPGPARSESPRACRHGGARWPASGPHVSEGPPGPRHHGYYRGSDYDEADGPGSGGGEEAMAGAYDAPPPVRHASSGATGRSPRTPRASGPACASPSRHGRRLPNGYYPAHGLARPRGPGSRKGLHEPYSESDDDWCN

SEQ ID NO: 151 - protein, 996 aa, Homo sapien
MRPVALLLLPSLLALLAHGLSLEAPTVGKGQAPGIEETDGELTAAPTPEQPERGVHFVTTAPTLKLLNHHPLLEEFLHEGLEKGDEELRPALSFQPDPPAPFTPSPLPRLANQDSRPVFTSPTPAMAAVPTQPQSKEGPWSPDPESESPMLRITAPLPPGPSMAVPTLGPGEIASTTPPSRAWTPTQEGPGDMGRPWVAEVVSQGAGIGIQGTITSSTASGDDEETTTTTTIITTTITTVQTPGPCSWNFSGPEGSLDSPTDLSSPTDVGLDCFFYISVYPGYGVEIKVKNISLREGETVTVEGLGGPDPLPLANQSFLLRGQVIRSPTHQAALRFQSLPPPAGPGTFHFHYQAYLLSCHFPRRPAYGDVTVTSLHPGGSARFHCATGYQLKGARHLTCLNATQPFWDSKEPVCIGECPGVIRNATTGRIVSPGFPGNYSNNLTCHWLLEAPEGQRLHLHFEKVSLAEDDDRLIIRNGDNVEAPPVYDSYEVEYLPIEGLLSSGKHFFVELSTDSSGAAAGMALRYEAFQQGHCYEPFVKYGNFSSSTPTYPVGTTVEFSCDPGYTLEQGSIIIECVDPHDPQWNETEPACRAVCSGEITDSAGVVLSPNWPEPYGRGQDCIWGVHVEEDKRIMLDIRVLRIGPGDVLTFYDGDDLTARVLGQYSGPRSHFKLFTSMADVTIQFQSDPGTSVLGYQQGFVIHFFEVPRNDTCPELPEIPNGWKSPSQPELVHGTVVTYQCYPGYQVVGSSVLMCQWDLTWSEDLPSCQRVTSCHDPGDVEHSRRLISSPKFPVGATVQYICDQGFVLMGSSILTCHDRQAGSPKWSDRAPKCLLEQLKPCHGLSAPENGARSPEKQLHPAGATIHFSCAPGYVLKGQASIKCVPGHPSHWSDPPPICRAASLDGSTTVAAWMVAKAPAASSTLDAAHIAAAIFLPLVAMVLLVGGVYFYFSRLQGKSSLQLPRPRPRPYNRITIESAFDNPTYETGSLSFAGDERI

SEQ ID NO: 152 - protein, 844 aa, Homo sapien [sequence omitted]

SEQ ID NO: 153 - protein, 415 aa, Homo sapien
MVFAHRMDNSKPHLIIPTLLVPLQNRSCTETATPLPSQYLMELSEEHSWMSNQTDLHYVLKPGEVATASIFFGILWLFSIFGNSLVCLVIHRSRRTQSTTNYFVVSMACADLLISVASTPFVLLQFTTGRWTLGSATCKVVRYFQYLTPGVQIYVLLSICIDRFYTIVYPLSFKVSREKAKKMIAASWIFDAGFVTPVLFFYGSNWDSHCNYFLPSSWEGTAYTVIHFLVGFVIPSVLIILFYQKVIKYIWRIGTDGRTVRRTMNIVPRTKVKTIKMFLILNLLFLLSWLPFHVAQLWHPHEQDYKKSSLVFTAITWISFSSSASKPTLYSIYNANFRRGMKETFCMSSMKCYRSNAYTITTSSRMAKKNYVGISEIPSMAKTITKDSIYDSFDREAKEKKLAWPINSNPPNTFV

SEQ ID NO: 154 - protein, 842 aa, Homo sapien
MAVRPGLWPALLGIVLAAWLRGSGAQQSATVANPVPGANPDLLPHFLVEPEDVYIVKNKPVLLVCKAVPATQIFFKCNGEWVRQVDHVIERSTDGSSGLPTMEVRINVSRQQVEKVFGLEEYWCQCVAWSSSGTTKSQKAYIRIAYLRKNFEQEPLAKEVSLEQGIVLPCRPPEGIPPAEVEWLRNEDLVDPSLDPNVYITREHSLVVRQARLADTANYTCVAKNIVARRRSASAAVIVYVDGSWSPWSKWSACGLDCTHWRSRECSDPAPRNGGEECQGTDLDTRNCTSDLCVHTASGPEDVALYVGLIAVAVCLVLLLLVLILVYCRKKEGLDSDVADSSILTSGFQPVSIKPSKADNPHLLTIQPDLSTTTTTYQGSLCPRQDGPSPKFQLTNGHLLSPLGGGRHTLHHSSPTSEAEEFVSRLSTQNYFRSLPRGTSNMTYGTFNFLGGRLMIPNTGISLLIPPDAIPRGKIYEIYLTLHKPEDVRLPLAGCQTLLSPIVSCGPPGVLLTRPVILAMDHCGEPSPDSWSLRLKKQSCEGSWEDVLHLGEEAPSHLYYCQLEASACYVFTEQLGRFALVGEALSVAAAKRLKLLLFAPVACTSLEYNIRVYCLHDTHDALKEVVQLEKQLGGQLIQEPRVLHFKDSYHNLRLSIHDVPSSLWKSKLLVSYQEIPFYHIWNGTQRYLHCTFTLERVSPSTSDLACKLWVWQVEGDGQSFSINFNITKDTRFAELLALESEAGVPALVGPSAFKIPFLIRQKIISSLDPPCRRGADWRTLAQKLHLDSHLSFFASKPSPTAMILNLWEARHFPNGNLSQLAAAVAGLGQPDAGLFTVSEAEC

SEQ ID NO: 155 - protein, 1366 aa, Homo sapien
MAQALLVPPGPESFRLFTRESLAAIEKRAAEEKAKKPKKEQDNDDENKPKPNSDLEAGKNLPFIYGDIPPEMVSEPLEDLDPYYINKKTFIVMNKGKAIFRFSATSALYILTPLNPVRKIAIKILVHSLFSMLIMCTILTNCVFMTLSNPPDWTKNVEYTFTGIYTFESLIKILVRGFCLEDFTFLRDPWNWLDFSVIVMAYVTEFVSLGNVSALRTFRVLRALKTISVIPGLKTIVGALIQSVKKLSDVMILTVFCLSVFALIGLQLFMGNLRNKCLQWPPSDSAFETNTTSYFNGTMDSNGTFVNVTMSTFNWKDNIGDDSHFYVLDGQKDPLLCGNGSDAGQCPEGYICVKAGRNPNYGYTSFDTFSWAFLSLFRLMTQDYWENLYQLTLRAAGKTYTIFFVLVIFLGSFYLVNLILAVVAMAYEEQNQATLEEAEQKEAEFQQMLEQLKKQQEEAQAVAAASAASRDFSGIGGLGELLESSSEASKLSSKSAKEWRNRRKKRRQREHLEGNNKGERDSFPKSESEDSVKRSSFLFSMDGNRLTSDKKFCSPHQSLLSIRGSLFSPRRNSKTSIFSFRGRAKDVGSENDFADDEHSTFEDSETRRDSLFEPHRHGERRNSNGTTTETEVRKRRLSSYQISMEMLEDSSGRQRAVSIASILTNTMEELEESRQKCPPCWYRFANVFLIWDCCDAWLKVKHLVNLIVMDPFVDLAITICIVLNTLFMAMEHYPMTEQFSSVLTVGNLVFTGIFTAEMVLKIIAMDPYYYFQEGWNIFDGIIVSLSLMELGLSNVEGLSVLRSFRLLRVFKLAKSWPTLNMLIKIIGNSVGALGNLTLVLAIIVFIFAVVGMQLFGKSYKECVCKINDDCTLPRWHMNDFFHSFLIVFRVLCGEWIETMWDCMEVAGQTMCLIVFMLVMVIGNLVVLNLFLALLLSSFSSDNLAATDDDNEMNNLQIAVGRMQKGIDYVKNKMRECFQKAFFRKPKVIEIHEGNKIDSCMSNNTGIEISKALNYLRDGNGTTSGVGTGSSVEKYVIDENDYMSFINNPSLTVTVPIAVGESDFENLNTEEFSSESELEESKEKLNATSSSEGSTVDVVLPREGEQAETEPEEDLKPEACFTEGCIKKFPFCQVSTEEGKGKIWWNLRKTCYSIVEHNWFETFIVFMILLSSGALAFEDIYIEQRKTIKTMLEYADKVFTYIFILEMLLKWVAYGFQTYFTNAWCRLDFLIVDVSLVSLVANALGYSELGAIKSLRTLRALRPLRALSRFEGMRVVVNALVGAIPSIMNVLLVCLIFWLIFSIMGVNLFAGKFYHCVNMTTGNMFDISDVNNLSDCQALGKQARWKNVKVNFDNVGAGYLALLQVVS

SEQ ID NO: 156 - protein, 1951 aa, Homo sapien [sequence omitted]

SEQ ID NO: 157 - protein, 380 aa, Homo sapien
MGAAAAQAPLGLPAASARLLLLATSVLLLFAFSLPGSRASNQPPGGGGGTGGDCPGGKGKSINCSELNVRESDVRVCDESSCKYGGVCKEDGDGLKCACQFQCHTNYIPVCGSNGDTYQNECFLRRAACKHQKEITVIARGPCYSDNGSGSGEGEEEGSGAEVHRKHSKCGPCKYKAECDEDAENVGCVCNIDCSGYSFNPVCASDGSSYNNPCFVREASCIKQEQIDIRHLGHCTDTDDTSLLGKKDDGLQYRPDVKDASDQREDVYIGNHMPCPENLNGYCIHGKCEFIYLLRRASCRCESGYTGQHCEKTDFSILYVVPSRQKLTHVLIAAIIGAVQIAIIVAIVMCITRKCPKNNRGRRQKQNLGHFTSDTSSRMV

SEQ ID NO: 158 - protein, 341 aa, Homo sapien
MLPEQLYFLQSPPEEEPEYHPDASAQELNVRESDVRVCDESSCKYGGVCKEDGDGLKCACQFQCHTNYIPVCGSNGDTYQNECFLRRAACKHQKEITVIARGPCYSDNGSGSGEGEEEGSGAEVHRKHSKCGPCKYKAECDEDAENVGCVCNIDCSGYSFNPVCASDGSSYNNPCFVREASCIKQEQIDIRHLGHCTDTDDTSLLGKKDDGLQYRPDVKDASDQREDVYIGNHMPCPENLNGYCIHGKCEFIYSTQKASCRCESGYTGQHCEKTDFSILYVVPSRQKLTHVLIAAIIGAVQIAIIVAIVMCITRKCPKNNRGRRQKQNLGHFTSDTSSRMV

1-15. (canceled)

16. A method of diagnosing the presence of a prostate tumor in a mammal, said method comprising determining the level of expression of a gene encoding the polypeptide shown as SEQ ID NO:123 in a test sample of prostate tissue cells obtained from said mammal and in a control sample of known normal prostate tissue cells, wherein a higher level of expression of said gene in the test sample, as compared to the control sample, is indicative of the presence of a prostate tumor in the mammal from which the test sample was obtained.

17. The method of claim 16, wherein the step of determining the level of expression of said gene comprises employing an oligonucleotide in an in situ hybridization or RT-PCR analysis.

18. The method of claim 16, wherein the step determining the level of expression of said gene comprises employing an antibody in an immunohistochemistry or Western blot analysis.
